United States Patent Application Publication US 2007/0054278 A1 - sequence listing, part 39

SEQ ID NO: 94449 - DNA, 1513670 bp, Homo sapiens
  misc_feature (1)...(1513670): n = A,T,C or G
cataaataatacatggtaaagaagtgtattcggcatgataaaaagtagaataaaagatacttcagccaccaaagccatctcactcctccaacctttgttcacaacaatgaacaatgggacactcctggaagttttccacacatgtacaaatagagattcacaattctggatctgaaattttgaaatccaaaaagcttgaaaaccaaaagattaacctggtgtaagactatatttagtgtttgcttatcccatatatgttttgttgcagacatatcaatatgtttgatgacagggtgctgtcataagacttctctagacgtgttatataccaaatggtatagacatatacctttctaaaaaacaacaaattattaatttctaaaacacatctgtcctcaaagtgattatgagcctcaataattatgtgtgtgtgtaacacacaatctttttatgttcacacgaatgggtcatactgtatatactgtctgatggctacatttatggaccagtttaacatttgtcctggagatcttaccatggcctaccaaacccttcatgatccggcctctgattgcctttgacctcctttccattacttttcttctcgttcactcttctccagccacatggctttctggctattcttctaccacgccagcatggtgtatcttaaggacttgtttgtatcttaaggacttgtgtcttaaggactttgcacttactgtaccgcctgtttggaactttcttgcatagatttcctcatggctgcctcccaccccacttcactgagatctttgttcagatgacatctcttcaaagaggccttccctgaccccctatgtaaaagaagaccacctatcactttctagcctttcactctgcttttttaccgctagcatttatcaacacctatgatagactatacatttgtatattagagtatggcttgtctactcttctagaggtcccacaagggtagggattttttttttttcaatgatttactcaccattgcatccctggcatatagtaaatgctcaataaatatttgttgaatgattttccccattttgcctccaaattaagctatttattttatagttacaaggctttcaattacttttacagcaaactagggagttacctaggaaaccctcatgagctggttcttgagactcttctggtttctttcactgctatcctacttccaatttaggttgtagactgattcgtttacctgcctgaactctggtgcttgccatgtactgttgcctctgcccagaacccctgtctctccttcactataggtggcagaatccactcattctggcattggcattggctcatatggggaatcacattgatttgctcatctgtttacatgcttacagtattcactaccgtaccactccagagactgtgtcttattcacttgtgaattacagcctctaacacaatggctcgcagagtaaccctcaatatataaaacacggaactgaattgaaactgcactctcctctactatattttttagtttttagaaaatgcttttaatgggtcttatcttctagaatgatgaaatgtctttaaagctgcagtgaaaccagggcaataagtttagagccataatttcttgaaagagagtgatgaaaaatcatcgcttaattctgagccaccctactgagatcacagcttggacactgagcttagttttatgcaccttatgttctaggtaactggaagatgattgcaaaagatggcactaagaaggattaagtgtgattatttatgaggcacagttaaaagcagacagcatgcatatgttcacaagctatagggaatagacagatctctaaatatctgatgaacaaatctacccaaggaatacatttaacacagaacaacaaagggagaaataagatgacagaaaaaaaaaacataggtgaaaaatttagaaaattttcagcacatcataagatggctcttactggcaaccagaattctccaatggtagccaaaaagcttaatgatcacaggttaagaaatgtgtgaagcagactagagcatttgggtacgactgagtttcccaaactttctatactttgtattacaaaaataatgcattgtttctccttttttctaatataatatttttgtattagatattattttttcaaataaatttgtaataaattacaaataaataaagattcttgtctgaaggtctgaattatgacctgtaacatatggctaagatgaattatgcagagggttgaactctttgacctctacggactttttagttttgaaattctgtttccatggtaaagatttccttgtaggccatgtgtgcttgaagaggatgctgttggaagtgtttgactaaagccagagaacattatgtgacctccagtttttctacacacaaggatggccccaagcttcgtgataatggggggttatggtgtagttaccattgcctcttacctttatgatttagttgaatgatacaaatggtacaaatgtcaggctcttctagtacttaccctgtttactttttgtagccataatatagtcatttgttaaccacatatttattgagtgctgactaatgaataacacaaaaataaagtttgttttttttttttttttgagatggagtctcgctctgtcacttgggctggagtgcagtggcacaatcttggctcactgcagcctctgcctcccaggctcaagtgattccttgcctcagcctcccaagtagctgggactacaggtgtgagccaccatgcctggctaatttttgtatttttggtagagatgggttttcaccatgttggccaggctggtttcaaactcctgacctcgtgatctgcccacctcggcctcccaaagtgctgggattacaggcatgagccaccgtgcctggcctgaaaacaaagttcttaccttcatggagtttaccttttgtttgaaggagacagatgataaacaaaaggacaaataaatgtgggtataatttcaagtaaagatatttgctatgaagaagtactataatggcacaatccacagaagtctttcacaaaattgtcttctgggtctaaaagtcacccagatcttgatgctaccttcttaaaatatccacaccctttactcatgtttcaagaccataaaatgaaaaacacaatgtttttaacacgtttctttaaatgtccttttccccttttcttaatcttctttctccttgcactaccatgccccaaagctcccaaagcaccctccttaaatgcccaaagagttcctattccccagtgtaaatgaggcttctgctattgtttggtttgtatgtcttagtgaggatttagaaagtacaatctatcttaattgttgatgagtgatagaaggtggtaggctgcttgggctttttgtatttatctacttagtttctgacttattcttattctgttagtttcagtgacatgagcttgtggtaaaccaaagccacctgtagcagatattattggtgccccgccagtatgctatattcccttactatttcagcgtataccaatgtgactcttaattcttctatctctggctttctgtggccactgaggcaactctgtctactcttggagcattgcagacaagccagggtcttaataatccctgaaagctgcccccaatcattgactgacggtagttggtgtttaaacaacccagttatcttgtcctcttggtggaatcactcagtctaaggtacatgttccatattgtttcccagagatttctaggaggattaagttctgggtgcctctagcggtaatgtgctagataaggcatctttttggtcttctcttccctatttcactttcttagtctcttactggtgtttcctgcgataacctcctaaataaaatacttgctcttgaatacctgtctccagatctgcttctgggagaacccatactaaggtggttattaattcagtcaagttgcagatcagacagtaacctcccactgattgtcttggcacttgaaggtcctgaatccaatgcaagttctatgtcttcatgctctttgtgaatgtatctgttgctcaaggtcgtgggtgaccttgagcccagcagtcagcattatccacagctgaagtaatacctatgtgctcatattaggctatctgacaacagtgcaataatcattagacaccactgtttagaccctgagtatgttcatgacatttgccttttgactgctaagtagaagatgtaatgattataggctgatgctttctcaggaggaggaaagttattgagctttacagtttcaaatgcttctgattttcttccacgtttagtctggctgctgacacatgtgttgaaatctctcatgtcgatcagcttgagaatagctgggactgctgagctaagtctgtgctcataaaagcaacaaagaattgtattacaggaaatgaccccaaattgacagaagattaggctaggaagcctgaacaggtgttttaatctctatgcacaaaatcagtctgtacatatattgctcacattcctgctgttttaactatattttttttttcaatttcactttgttattcacaatttgataatattttatgtggccatggtgtctgtgtgatgaactataatccaatgtgacattctctgagagtcaagcttccaaggacatcagattttcacaccaggacactttgtaggacaccttgctactctccatgggattcaaatattagaaataatgagagatctaagacttgatgtaattgcctgcatgtaatgaatcaggccaaataaaaaagtgagagacagagaaaggaaatggtgctaaggaaaatggggacctatcttagtgtttgtctgagagaaaactgctctttgtttttcctgatgtaatggcaagagtctgcagccaggaatctagtccttgcttaggagctgcatgaccttgtgaaaattacgtaggtgttctgcaatttgtaattgcatttattgtaaaattaattttacttttcatacgtcactagacagagcattttgaggttaggaattgggtctgaatcaatgatttctccagcacccacatggcatttggcacagaatacatcaataatgattttggattaaacaggggaacaagcacaaggaaccatggtggtcagaaacgggttgatctgcaccagagaaagggagactaggggagaaaggtcactctagatttcgttcaattattgaaaatacggtgtatttactatgtgctgggcacttttctaggtgctagaaagactacagtgaccaaaacaaaaatccacatctgcagggatcttgcattctagtgagaaagtaagatggtaaaaaagataaatacgtaaattttatacaatgcttcgtaacgacaaatgctaaggagaaaaacagcacagaaaagacagaaaggaaaagagaaggggcgcatgtggtgcaattttgttaggatgccagggagggctgagcgtagtcgtaaatgaccacattatttgatggatcaagccagggactgcaagtctgtgtttctgagagacacataaagaaaagaaggcttaaggaatccagaaagatccagagtggggaaatgaaacgaaaagaaatccagccagtgggaagtcgtgaagggatagttaaacgcgttttgggaggaaagaaaaaagcaaaagtgcggtacagcctttcgttacacgtgaaaagaatcatgtttctttttctagttagaaaaagccaaagattgtgcgatttatgccccaaacccccttgtaaggggattctcacctcaacttgtcttctgtggtcagtgtttcccgcccctgaatcagggttactgtcactatggctttcaattggcccggcgtaggcgcatgctctgcgcgtattggcctccgctcctgtccccagacaagcggccatcttgggtcccgcccctaccgtggggtcttctgggaattgcagtccccgctctgctctgtccrgtcacaggactttttgccctctgttcccgggtccctcaggcggccacccagtgggcacactcccaggcggcgctccggccccgcgctccctccctctgcctttcattcccagctgtcaacatcctggaaggtaggggcggggaggcaagcccaagtggaatactgtttctggggcgcgggtctgggtttccacgcgcgtcaggtcatcaccccggagcccagtggggccggcgccgctcacggggcggtgggcttctgtcccgagtactcttccgccccacgagggtctcagggtggggactcgggccccccaattcccaagcaccgaccctagccctaacccgttcctcctccaccgtgtttatacattggggaaactgaggcacggggccacgccagcgggtccggggacgccacagctcttggctctgggggtgtagtcggcacccgccgttttgggatggttcgtcagtttcatagacaagtagcgaaaatccgtcccaacaggtctgtgttaaacacgcagctctggattcccctaaggggttgctgaacacgtgcccaggacaggagcaaaccggagtatagagaaggcagcattttgggagataattttacattactacttcaaaaacaggcaaaraggcatcgaatttattgttgtgggagaactcatcggtacttggtcggactttcttacacttattttatggttgttgtttttatttttagcgtcaaaggggggaattttaaaggtatatccaagttggtggtggyggggggtaaggaggcaggttagtggaacttgagatgcatctgcagatttctctgtaggctcacattctgccctcgctgtgttaccttggaacagccactcacagcgcttatctgggaaacaaggagctcaatgctcccaggtcaagtggccaaaggatgttgcctgaagccgaaatctaaattgaggttatgcttgtgaaagtttaccacttgcagatttactgctattattattctggtctctcagaaatgtgctgggaccaatagaaaatactcacagtggttgttttagtaaggttctgacctgggccgggcccagactaccaagggtggtccctactcgcacctgatgttaagccggatctacctgaactctccctccttggcttcagcctgcggcctgaggccttggccgcggaggcttctgggagttgcagtcccgcctcttgtttctcgtcgggcaggtactccacctcgtggcgtgccattttgcacggcgagatgtctcctgggagacgaagtctcgcttctagccgttctgtagagcagccgcttgactcggaactacaactcccatgtggacctgcgttcatggctgccggcctgtgtccacctgctgcaacctggactagaaatatttagtaaagaaagaagtctagggttgtgtgtgtgtgtgtgtgtgtgtgtgtgtgtgtgtgtgtgtgtgttgttattgattgcatatgctgttctaagtgttagatatgggattgttgtatacggtgttccaagtattaacgtacatgcttccaaaaccactaacacttgaccatttagaacctgttcacatgatctctttttaatactacatttcccatttgtatatgagaaaaaacttgagaagatagcccatgattacacagctagcaatataatatatattcaataaaatatatgtgttataatttaatcctcttaaaagctatatgagagtgagaaccatttttatatcaactttacagattagaaaactaaggctaggaaagttaagtaacttgttcaagttaaaacactggtgaataaaaggactgagactgtaagcccttctgcttaacagtctctgcttagagaaagaccttaccttacagagctgaggaggagtccaacctttctggctacagaatttggaatcttttaattataccatgctgcctctgtacttagatactaaacatttgagctgcaaaaacctttgagatcatttaattctaatgcaaagatcttggaacacttcttggcctataataaagattccatatatatatgtatatagttttagaatacctttattttagagattaggaaactggcccaggtggtaaagcagtttgcccaaggtcacacagttggtttgtgtcagagattagactagaaccaagcatcttattttcaagtccagggttattttcattccaccagcagtcagctagcaggaacaccagawgtgtagctctttagataatggtttctcctctaatttgctctttcaaggccacagaccaggaccaattgttataaattatcttatttattattggtaaggttgtaatacttcatgaattcaacaaatgttttttgagcttctttatatggtcatctctcttaaggtgcaaggaccacatagatgataaggacttaatgcattcagactggaaggaccttataaataatctaatctaactcttattttataaatgaggagagtgtgttacgaagtagtctgcaatcttcatctcatgccctcatgtcaaaagtatcccgtttctgcaagaaggcaggtttctggagtcctcacagtagtgtggataacctttttaggcttatgcttttctatttggtatccttgtcttggcctttttcctgcagcctttgatagaatgctttaggaaatgtttttgtgtccccatctttatttgtgtgtttatgcaacttcaacatgctctgtttctattttggaagttagtctggttttggctcccattactcttttctcttttgttctttcagacacttgagaacaaattctgacactatgtttgcattcacatgttaaaatctgaccctctaatatgaactctcagaaatctatcaagttgtgactttcattttggaagacatattggccctttcaattatgtattcacagataataaggcaggtaactctggtctcttctgaaagatgatttccatatagttaggtaataaagtaacagttttatgaattattggctaaacattcctgaaacagtctatttgagaagttctcctcatcacccccatgcccccacccccacgctctcccaactgatagtctgatcattcagcttccaccacagtgcctgaccaccagtagacactgaaaaagwacttgtggcattgcattcataagcaccctgttcccacatctcttcattgaatctgtttactcttttaatgcagaagtgcagctttgaaatataagatgtaggaggttactttgctttcaacatgtacattgcagagaaaaatctcagcctttgagatcattctccaaggggttgtctctttgggaatgtccatatctgtgacttctcagatgagaaagtgatctatatagtaagacatagcagagaagcagtagaggggttgtctggggacccatgatttaattcccagctgtgccttttagacaggttacttagcccttggttttctctcttaaaatagggataataagcatttctacctcacagtgatgatgaagaagaaagtgtgtttaaagctttgagcatgttgtcaggctcttaacagcttgcagtcaatagataaatataatagctcttatttttgttattgtaagcctgatatatgaaaattcacatttcctcaagatttaaaactttaagcaggtatttatattataaaaggatttgtttgccacttgttttcttagagtagcacacttggtcatcacatttaaaatatgaagttcctcacaactcttgataacctgtcttgtcagcacagtgacactctcttgtgtgggcagagagacagtgaagcttttggctcggtactgcctgctgagaggcccctgatctatggttccacctatatattaaatccttgatttaaaagcagcctgtttctgtcagtggggccttctgtccatctctagaaaggattggtcctatcccaggagsctcagggttagagtgaggcagttgtcatccagctggtgagtaatcctggggcaatgaccgtggggatgtggcagtgcttctttctaaagctgacaacttcaatagccatgaggttaygataaggaggtgagttactgaaaagaagtgatgcagggaacagggaaggagcaacaggaatgaggatcacagcaacagcagaggagaaggacaaaggaaacagcggaggccctcagtatcctaaacatatttttattcagcacatttatcttgctcctagctctgttccaggcactgcatctgctctggtgagagcagtaaatggggctggtagggaggcactgatggggtgagtgagggtatattctcggcagggaagaacctagtacaatggaggacaggagggagggagggaggggatgttgggatttgatgagcagaaagaaggtctgtgtgcttagggtatgaaaatcaatggctggaggaggtggagagaataaggctgcagaggtgagcctgagtaatagatatgtttttctttttttaaatttttttaaaattttactttaagttctgggatacatgtacagaatgtacaggtttgttaataggtatacatgtgccgtggtggtttgctgcacctgtcaatctgtcatctaggttttaagccctgcatgcattaggtatttgtcctaatgctctccctccccttccccctctaccccacaacaggccccggtgtgtgatgttcccctccctgtgtccatgcgttctcattgttcaactcccacttatgagtgagaacgtgtggtgtttgcttttctgttcctgtrttagtttgctgagaatggtgagcctgagtaatactatgcagagtccggttacctgcatttcgacyttattccgagggcatttgggaaattgtttaatggccttaaatggggaaatgaaattgttggatttgttttcataaaagtatggatgtatagctatgtattgtattattgaagattacttagagtgtagactttaagtgttcttgttcccagaaaggggtcttgatccagaccccaagagagggttcttgggtcttatgcaagaaagaattcagggcaagtccacagagtaaagtgaaagcaagtttattaagaaagtaaaggaataaaaggatggctactccatagacggagcagtcctgagggtggctggtttctcatttttatggttatttcttgatgatatgctaaacaaggcatggattattcgtgactcctctttttagaccatatagggtaactttctgacattgccatggcatttttaaactgtcatggcgctggagggagtatagcagtgaggacgaccagaggtcactcttgtggccattttggttttggggggttttagccaacttctctactgcaacctgttttatcagcaaggtctttattacccatatcttgtgccaaccttctatcttatcttgtgactaagaatgccttaacctcctgggaatgcagcctagtagatctcagccttattttactcagcccctattgaagatggagttgctctggttcaaacacctctgacattctcaccacaaataaatacgtatttgaggtagtgcatattaattagcttgatgtagccattccacatgggatacatatttcaaaacatcatgttgtataccataaacatatacaatttttatttgtcaagtaaatcaggttttaaaaagtatggatgcattatggataatgaatttatctgaggtaatagttgatgtgggataagcatgtatgtttgtgcttctttaattttaatgtgcatacaagtctcctgctgatcttaaaatgcagattctgattaaattaaagacctggaaaggatcagagagtcagtatttctaacagactgatgctgctggtccatggatcgtcctttgagtagcaagtacttaggatactcttcagtggtctaggtgacagatgatgtagttaagagaatggactcgatagagcaaaagacctggactttaatcttggttctgctactttctatgtgtgtgactctggggaaagtgtccaaatctctctgagcctcaatttcctgatttgtgaaatgggggcgataatttctattgcagagggatgtttttagttttcagtgaggtaacccattgaaatgcttaacacagtaactggtactccataaatggtagctaatgattttattcttatcattgtcaataaaaaacacaagttgatgcatcctgctctgtttccttgtttatcatattttgaatactaagaggacttagataacctttaattctactgtttttgcttacctctatgatatgatgtttggaatttcttcaatcctctgtaaaagttggcgtattatggggtcggggaggagaagtatcttttcctcaccctcaggttcttggttgactccccwgtaacaaaagacagattaacgagagaaaagcacacagatttatttaacgtaagttttatgtgacacaggattcttcataatggaatgaagacccccaaaactggtaaacctgtgtattttttatgctagatttgatgaagaagtacatagttgtgtagaagtatgattgaataagaaaacatgagctaacaatgggaggaaacatagcaagacctgtttgttcagattctctgtaaccctttgttttcagagataaggatgttctttcattccaggtatgggaagtgagaaacctttcacaggagggtcttagacctgcttcaggagaaggccagataattcttcctaggttttatgacctgcttcagagagggcagaaggaaggtcagagagtgacctctgaccttctggcttctgctgtcttctcaaattcattcagcttacaatatttcagggtagtatgtcctgaaccccatcatgggcaaatagatatatttcatcccatgcaattgagtctttctaaatttgatggacaaaatctgggatccttaaattaacacattatatctgattattaggatgggaattcgaggtacctggcctcctaatgtaagtttattccttcattatgtaattttaatttgtttggattgctttccaactagtggctctcaggcttggctgtaagttagaatcacctggggctggtcccatccagataaccgaaagagtggggaggggagcaggtgttttttttgtttgtgtgatttcttttgtttgtttattttttacatttcccagctgattctaaagtgcatctaagattgaaaaccactgattctaataacacagcattgtggaatgattcgcagctgattctaaagtgcatttaacattgaaaaccactgattctaataacacagcatcgtggaatgaatcaggtataatccaataggtaaaaggtctgagtggggaatgaaatatctagaaagtagcattttgaaggctttgggartgaaagaaaagcgtcatcacaaagctgtcatggaatttgatgaactaactataaattttgcactagttrtctttgagattaactaccagggacactctttctcccctaccctccttgtatctcttgctgtgcttgtctaagggttttccttatattgaatttcaggttgtgtttctcgtcctgtacttagtttgcctcattcctcatagctgggggtggagtggggggctataatcccattaaaactgtgttccaaagaaactcagtgacatgctttcatgatctatggcagtgttattgaaagggtttaaacagttgttcagataaaataccactcatttttactggtaatattcttacattctaattgagtagcttgaaatgaaccattgaaatgaaccacttctagaaaggctgcctattataaagttttcttcctacccccatcctctgtcaaagcagaagaataattaagctaatttgattacatacctttaattttcttgataatccatatatgtggtgattgtgagggaggaaaaaagaaaaacaatcctttctctactttcttaggttctgctcctggggcactgaaaagtaaactgacaaaagacagattaagaggagaaatcatttattacatatgcatacagaggccttcatagaaaagaagtgaagaccctaaagaggtggttaggtctgggggcttatatattatgtggagaagaaactagacaaagtgaaacctcctttgcaaaaattatgacggtgaaagagatctgacctaaccgcatctaacttgcctctaacctcyaagctgtcctcgttcattcctgtgcgtaggccagactaactttgggaggatcttagtttatagtgtaactttggaacaaagatgataacaaccctttcccaaaccccctaggactaacaaattagccacaagtttagaaattatggtttaggagtcatgcaactagaggccacaagattctaaacctccccagttgctcctagggataacatcaaaacctaaggttggtgctggagatatttttccaaccttgcactagatggatcagatagcaccacccaggttgataaactggctcatttggtcttgtgcctccatgcaggaactgactcagcacaggaggacagctttgactccctgtgatttcatctccaattcgaccgatcagcactccccactgcctggcccgctacccaccaaattatccttaaaaaatcccagtctctgaaatgttccagggagactgatctcagtaataataaaactctggtctcctgttcagccggctctgcatgaattaaattctttctctgttgcaattcctctctctggataaaccatctgggcagyaggcaaaatgaacctgttgggtggttacaaaaggacaaggggatttgggcttctggggtagggggataaactgtgaaaaaatgactaggaaaatgtatggtaaatgaaggttgtttagtaaggtttgtttatgcaggtaagaagtctctctggtagggaaaggggaaaacctttatttatagaaaatatgtcacctttacaaaggaaaatctrtgccctgcttttagctagatggaggagggcagaggtgttttttttkttgttgttgttttttctgaatctgctgttcttaattgccttcaactcaaataacccttatgccaaagtggcatattttggggtagcatattctgatcccctttcagaccctwtcctttggaaagttgtttttctgactcatagaaaatgcatacagttatatttgagtatttatatttatatttaaacccttatatcaacggtccaggaacattcttggtttgaatatatattacccagcaccgtaatttcatttttcagcatttcctgaacctttctgcccaccaggaggttatttcacaatgtagtggccttacttttctggtctgttcactccatacagagaaaaagagaaagggtgggaaaaagagtgtttttgccagagtgttaactgcagttaaaaatcacttattttaggggtattttgtttgtatgccagtgttttcttttaatgatgaataagtgggaatagaagagaaaattgagaaactgcttgagaagttcacaaaagatacacattttcaggattctgtaacttaaagactcttgctgagtctttttaagtgtttattagtgttctttgttatggatttacctctttttcttaacaatcagaatcctattaaaattcagtatattttgcagtttctcagactcacagctactggagttagaaaccatcatagataatgttgaagtatcagtactccctcacaaggtttaatgcatgaatattttagttagaccaggctggaggagcatacaatctayagtcatttaatcactgaagtctgtggaatgtggtaagaacaagatttttattttctgagaagtcttcttcccacatcttagttttgaaaaaacaaagcaaaacacaaaactcactgctgcctttggactccacattaactgaaggacggtacctgcttggttttgtcagtagatgtttaagctgtgcccagaagcacragtttacctatgcgtttggagccctgaggacaggtggagggaagggttggaacctgcttagagtaagattgtttcagtcctggagcactagcgattccagttcaatctcttctaggaatgaycctggcaagaaatccaagggagagcaggagaggcaagagggaggtaaaacaaatgcagagagtgtgggagaggtagaacaacaaaaaatggtggggtggagagagaggggartattktrttttacagccacttgtgtaagtaaaattagtctctgcctgtcagttactacatcatcagaaagtggcaggtctgattttcactggatgtagtctaccactttgttggcctgcctggaagcatagactatgtagcacaccatatgccactttgggacgccttacatagatgagtagtcagagtctagygcagctgaaattgaggtaccaaggcctgtgccaccaacctttcccaatttaattgatctggacgagacatgctctagtgattctaacttgtagccagggccaagaaccactggttagaaagcaatcccaatgggttaaaattatgtaaagaagggggcactgtaattggctacataaatttccattagaaggcaaggtaccttaaattyccatcttaataatcagatataacatgttaccttaaagatcccagattttttccatcaagtttagagagactcaattgtatgggctgaaatatatctatttgcccataatacctcaaaatttacagcagattgaaggagttctagcttgggccatatgcctaccacttggaattgtttctatagccagttgraggggtactgtgagtggccaggtgtggagcaaatgcccaccctgggagaggagagattcacccagaggaagtgggccagggctgccacattcttagcatcagaggccaccattcataccagagtatatgtgactggtgcctgctggagttgtgctgtgcaaagcttgcagggctgtacacacagaaaggccctggttaacgagagctgctgataccttcagaagagggatgtgacactagggatacagcaaaacaggtagccactgtagtttgaaatcccatttgctgggttctgccagcctggtggataaaaacaaggccargaagcttcagaaaaatctacagctgaggccctctcttggctcctctgagcagggataaagcttcctctaaactaaggcttcctctagcctcttgaacttccacaaggcaacaggccaaggtttccctggcctagaggtgttagctgtgtttggcttcctgttgcagatggaacagctgggtccaactcctgtgggttgaggactgctggaactatatgcaagggccctggtgaggccagaagtgtttgcatttccaacaagctgccaggtgatatatatgttgctggtccatgggctacacttgaaataaaaagatttcagatttttgtggcttctactaagttgccattctgttttaatgtaatgagtagtattgtttagaabttrtatatatatatatatatatatatatatatatatatatatatrgccagttgtttttctttgcagttttattkctctttgtaaaatggacataatagtacccacttcgtagattgytatgaattaaatgggatgatctatataaaatatcagcactgccctcatggagtctagtgaaggggacagataacacataggcaaacacctgtaataataatatgtcaagtacaagaaggaagattataagatactgtgatagaaagagggatgagtaacctattgagataaaatggccagacagaaagagctgagaattaagcagagacctaagtaaaggatgagagggagctggccatatgaagagctggtattaatagaatggggtcccaggcagaaggaatagcctataccaaggccttaaggtgggaaagagcttaacaccatcaaagggagaaaagaaggcccctgtggctgaaccatagagagggaaagggagactgacatcagatgaaattggctgtatagatagggcccaggccatacagggccttgaagtcaaagtatggaatttggatttttttcccatgggtaatgctcctgtccctggatctcagtattgtggttggatccatgctgtttgctgtctagacctctcttccactcatctgcttctccactacttctagactttttttttcccctccctttggccagaacatgagttacagtcctggctgatgcttccctaatgcctactatctccacaggctaatttgttacctgttaatacactctctggaccctaggttccatttgtataacccaattccttctcatttccttcactaggttctgatcagagcatctgcgatacccacttctgccccctaatgcggtatcacatccatatccctcctgatttgacttctctgccaaatggcagtgaaaatcaagaacaaagccctagcagtagtgaggcagatgaatacaatgaaagggactgacagtttgggatcttttaattggtggaaagaagaggagatacataatttttatatgttagaatcatggcttcaagagatttttaaaaagagcttgaaagaagctggttggattcatctagtctactctcctttatttgcatatttgaaaaactggctgtaaagaggaaaaatgacttggtgtgggtcacagacagtgcaattggcagaatgttgacctttcttagtctcctataggttagctcctgtgtcttttgcttccttcttatactttttacagcttttatttaacctttgattttaaatcaatgcttctcttccctttggactgtaagctctatgaagggcagcggtagtggctattttgctgatggctgtctcccctgcacctggtccttatgcagggtgagtgatttatgtcaggtccctaactgagaattcagtgttagattttgcactgtaccacactacttctgggccatcttctgttactgattgtaagtcatttctctggttagctgagtcttggctgcatggggagtatatgcaagtgaaatctacagaaactgcagacttcatccccttttactatttctctgaatttgcatagcctcccgtttcctccccataatggtgataatgctttgtttattgtgttaatattatctatcttccctctctagaaagatagcactatgagggcagggacaattgttggtgctgtttattgctgtctccatgcatagaacaatgcatggcctatgataaacaaaatgaggtgtgactcatcatagccatcaagatctgaaagtctgggttgtctgaagactgttgctctgtgcagatgggttatttatactttgtagagaataagatttttcaaatactggggagtcacagagggacccttgagagaggaattataaataagagcccattatctgaccctgaggactcacttctggctttgcctctcatttgctgtgtcatcttgagtgaagtgctcaacctctctgagcttcrctttcctgtaaaatggagatgataatactacctagctcttagagctgttgtaagaatcaagtgaaatcattgatttcaattatgttctacacagtgcctgatacatactcagcactcaatacgtatgacctgagatcagtgtcattaaacctggaatgttactctattcctggctagcagttatacatgcattccagtttttactttataaatcataactaaacctttcccatagtactatgttatttggtgaagtttcatattcactttgaccatcaaataaatgtagaaatcatcagttctggctatttaaagtttactgaaaatgttgatgaacaacaacccaggattcagcacaaaaaaataaatcctggttgatgttaaagacaggaatataaatcagaaaacaaacatatctgcagtactgtaatatttaaatggcttctcataaacacttaagattctcattagtccaacatcagaaaaatgataaatattaatatctgtcatcaaaggaaagcttagaaatcaaagcagagtaaacaactgttgtatttcaaggattacataatactgaaagcatttttaattaaacaccccaaaactctatttttaaaaaactttctgtacgagttggtttatttttatccagtatacaaactaagatggatgtacatttaatcagaaaaaatgcaggtaatttgttgagtcagatcatgttctcaaagatttaggttgtgttgtatgtctacaaaagagacccacatgtgtctgaggcaaccctccatctccattgatctttaattctatttcagggggattccattggaaatgggccctaggtagatcatgtaagggcatgggtgcttcctgtcttcattgtgggttctctcctgaagagsctcttctcaagtcatgttgctgctactctgagtgggccaggaagcatatgcagcagtcccagggtcagsagggagcagagagagggaggacagtctgctgtcatcactctgaagctgtcagctttcccttcctgctttcacagtgcctgagatagctgactcaacatgagatggctacatcatgtcaactgggagacccaggttttagttctggctctcccactgycttatgcaagtctcttttctctgggcctccctttccacatctgtaaagtgagggcttggatctgatcattctgaagtcctattcctctccaacattctgtgacctgggtagagcacttcagggacctaatgagctgttttccctgccctctgtagaagagtaattctggagtggctggctttggaaccagtcagagctatagctcatcttaagtaactcatttaagttctcagtttcctcatccattaaataagaatagtaaaagattgttgtcaacacaagagatgtcactgggaaggcatctagagctgcatttggcaggtcacagggattgaataatgatgctgtgttattattattattactaattaccataatatatattatataacaataatatatatttatatttatatatctatattatattattataacatataatataatatactatatattataacaaaaatatattattatagtatatgttataatacatatagtaaatatagtatattgttacatactrtatttatatcttgacttagcactttcctggctctttataccacagttttctcatctaaaaatggggatagtaagagaacttacctcattggttagttgtgaggattaaatgagataatacatgaaaacacacagggcactttctggtacatattaagcactaatgacatgttagtgattattttagctatgattttattattggtcacaataccttgcttttagtgaaagtactggacaggacaaggtgaatggggtagttacattctctaatacacatgctgaagtcaatttccagtggtctaaaaaaacccaacattttccctaaacatctcatttatcatagggaacgctaagtaaatgatactgagtctgcatttaaaagtcaagtatctgtatccaacatgggttcttttttttttgagacagagtctcgctctgtcatccaggctggagtgcagtggcgcaatcttggctcactgcaacctccgcctcctgggttcaagcgattctcctgtctcagcctcccaagtagctgggactacaggcatgcgccactgcacccagctaatttttccaacatgggttcttaaaccaggatgcttgggcctctttaggacctaaaatttcaggtccatgatctatctgcacataaaaattgaaagcaagttaaaagagaccttactttttttttttaaattagattactatggccaggcactgaactaagatctttatgtagattttcgtatttcatcctcttagcaactctatggagtcgatacttgtattatccttgttttacacacgagaaaactgaagctcagagaggttaaacaagggctcaaggacacccagttggcaagtggtgggcctaagatatggacccaggccatccggctagggagcttgagctctaatagctaatgtccttaggtggcaaaaaggtcagacctgcctgatagctaccttttctgtaaaatgaagtstaatggataaggacaaggatataaaaggaattgcttttatcaatgacatagcaaattaacattcatttttattgttttcaagatcattccatttcaagtgaggggatgaatttcaatacaaattagacttatttaaggaaacatcaatatttttctcaaattagcagtatcaaaaccttatggaattaaagaaaatgtactgcatttatacaatgcaaatttatttggaaataaaatttctttatcattttctgtagcttagcttacagctgttgccatgtctatttttaaaacacaaaaataaattgtttcttgttaactccattggatctgcaggcaggtattagacaaagttggtgtggatgaattgaacatcttggtcggagggcccagaatattctgtaagaaggtgctatttagaagaaattttcttaccaactgcacaagaaaataaatttggaagatttaaaaaaatatagaaatactcaaaaaataaaataacattgcatttcacccattcatgatagcactatcaatatttcagtgtgtggctttttttccattgtttttattgcatgcatattwgttctgttagttttctaacagaaaatggacacatttttctaaatttggataatactttacatayagttttgttttctgttttcactcgtcaatatattgtatgcattttcccatggcattaatgtctacagagtattccactgttagaacatkacattattttttaatctatcccacttggtcaacatataggttttcctcaccattttttctgatgtatttgcacgtgtgcataatcacattcatgattttttcttaggagacatttccaggagtgggaatgctgggccacgttgtaaagctgtaggagtagctgcctggtttttctttgcagcaagcagtgctcccctatggatctmgartcctcactaacagcttctcctgggctctacttcccaggagcttcagagaagagaatacagagccagaagctagtggggcaattaaccacatcagtcttcagtttctgctggttgatcaaagaaatttgctgggttgcctgtactggccttaatgtgtcatgtattatttaataggttactatgtcagcttcaaatgctttcagctgcaagtaacctgcttaaaaagaatagaggtttgtttcttccacataaaaagaagtctagaaatggttagctttggctttagttcagcagctcagagatgtcaaggagagtgtatcttgcagttcttggcctttccataatggccacagaattgctgcagctgaagcaagcatcatgtttgtattcagggagtcaggagggggtgagaggacagagagatgaatgagacacattcttgatcctgggagttgttagcctgattaaaaaagtggtgcttttttctcatattgcagaaataatatatgttcattatagaaaatatatttcacccataatcttgccactcaggtaatcactactctcatattggtgtctatccttctagtctagttataaatgcacagatgcacaaaaaatggaattgtccatttatatactgttttgtaactggccttttaaatcagcatttagctcagtgcctagtacctggtagatgctctaaagaaggtattgaaaaattaatgaatgatttaaaaaatatactatgaatacttttctgtgccactgagtattctacggtatatgttttacagtgtagtttttgacagttgcatgttactggattgtttagatggcccataatttccttcactggttctttattattttacatgtagattaaaaaaattttcttaactatgataaataattctgcagtgaatgtgtgtgtgtgtgtgtacacaaatctcttattattttcttagataacttcctttcaaaagtggaatttctgggtctagggatatgccagttttaaggacctggatgtataccaccgaattgccctctccaaatgtgtgactaacaccagcaatgagaattataatcttttagctctttatttttacaaaacaatataaaaaggtataaagtgaaattttgttcttgctcctcttctcataccctcatctttgtacccatctcccttaaggtagtagccacttttattagcacacaggcaaatatgtatgtacgttattttccttcctttcttatataaagatattgtacaatacacattgttctgtaccttgctttatttggtttgactgttatataatgttccattatgtgaatattctatttatttasctgctctcctgtccagtcttatttgaagcctgtgtcttttcagccaaactgggcccaagttaaccttaatattctggccctgcacctaggcctaataggagcaggcagctgtatcttaatttcctagtcctgtggtctggcctactacatattttgactggctcccagggcatactttgcagtatttgaaatattctgaatcttctaagaagggagagaatttcaaaggtatgtttctcctcttgaagacctccctggtcctcccctgtctttgattatgagagagttttatcttctagtttaggtagagagccaacccctcctcctccaaggggtggtgggcatatatgggaaattatgactcacataccttttaaagaatttcatctcacagagtgctgtgtccattgtatgtttatggaatacgttttttcttttttcttttgagacaaggtcttgctctgtccctcaggctgaagtgcagtggcaagatctcagctcactgcaacctccacctccctggttcaagcgattctcgtgcctcagcctcccaagaagctgggattacaggtgtacaccatggtgtctggatgatttttgtatttttttttgtagagacagggtttcgccatgttggccaggctggtctcgaactcctggcctcaagtgatccaccagccttggcttctcaaagtgctgggattacaggcatgagccaccatgcccggcccccattgtatgtttaacttttacatatggacagtcttgtattgccttatttgttaaaggcaaatgtcaactttactttttttttctcactccttttattggtgcagaagggcagagcctacctttaagagcccaccacagtcacaacccaagcacatattttcattattcagaatttatgccagttcaataatataggcatacaaaaaataagggcacattcctgcatcacagtttcattttccatatgtatggctcatgtagttccttatccctccctgtgttttctgcctcagcctttcttttttccatagcacttgttacaatttgaagttgtctctttatttattgcctttttctccagctaggtgttactctctgtgaagggaagaactgagttggccaccagactctagtacctagcatagtgcctggaatatagaagatcctcagtacatctttgccaaacaaatggttcatagtaactgtccatatgctatgtataaagcacagttgattatatttattgagtttgaatctgaccattgtttgaattaataaacaacattaagaacttttagagcccagtgagcattttttttttttttccgtaagagaccgagactcactcttttgcccaggctggaatgcagtggcatgatcatggctccaccttgaacttctggactcaagaggtcctttcacctcagcctcccgagtagctggaaccataggtgcccaccaccacacctagcaattttttttaaactttttgtagaaatggggtcttattatgttgtccaggctggtttcaaatgcctggactcaagggatcctcccaccttggccttccaaaatggggtttcaggcatgagccattgcacacaacccagtgagtattttttaactgaaatttttatttagatagttctagattcacatgcagttgtaagaactagtatagagagattcatgcctatgcgttacccaatttctcttcatgataacattttgtaaaactrtagcatcatatttactagcgactcattttatttagatttttccattttactgttgtgaacatttagttctatatgattttaccagtgagtatttttaaattctaaaaggatgacttcttattcttgaacttgaacacgtcagtgatagaatccacagttctgaaatgtcctttaaaaaaatcacagaatattagtgtaggaatcaaatttaatagattgttctgtgatataccagttccaaaactttagaatttcagaggctgtaaacataatttttgarttaggaagtgagataggatgggagctgacataggattgctaacttttaattctgccaagcaaagacatttaaaaaattattattttttaaatttttctcattttgctaggtactggttaaaaacaatattatggtttggtcctggtttgtcaactggtccttagcaatccttactctagtctaattgcttcatttctgagaatcagaaaatttaagtgtgtgatgatattaggccattcttgcattgctataaagaaatacaggagactcagtaatttattaaaaaaatagagatttaattggctcacagatcttcaggctgtacaagcatggtgctggcatctgctccattttgggggaggcttcagggagcttttactcatggcagaagacaaaatgggagcaggcatgtcatatggcaaaagcaggagcaagaggatagtaaggggaggtgccatacacctttgcacaaccagatctcacaagaactcactcactattatgaggacagcaccaagaggatagtgctaaaccattcatgaaaaatccacccccatcatccaattacctctcactaggctccacctctgacactgggaattataattcaacatgagatttggggggacaaatacccaaactatctcattgatccaagtctttctcattgtgtcttggcattttcaagttggaaatactaagacatgatcagaatatgcttattttatagctaaagacaacaaggtacagcgaggggaagggactttttaaggtagcagccaaaccctgtgtatacctcacttcccttactgggttaacctgcctaaggatcttgacctgatgcaccaaggagaaatggttactgggttgatctagaaggaaggctagtggatgtttattccagcctcccaaacaatataaacatcccttttccagtatttctggaaaatgatttatctggtctctacatatatttamcagtagagagagccctactgcataaattagctgttattacacctgttgatatattgttctaaggtctacacaagcttcccagtaaatctgaatccattaataataacactattatgtactgaaaacttactttgttctaggccctgtgctgcacgtttgacatacctccttaatctctgacctgtgagatgagtatttctattgtctccagtttcctaatgagggcctggttctcagagggctagagttattagcaatgggtaacacagctagtaaggtactacagctagctaagtaattgggagttatattagttttctagagctattgtaaccaattgctacaaatttggtggcttaaaacaacagaaatttatttcctcacagtcctggaagccagaagtccaaaatcaaggtgttggcagggccatgctccctcaacaggctctaggggagaaaacttccttgcctcttctagcttctggtggccccaagcattctttggcttgcacccacataactgtttgcttcatttggccttctcttctatatcttcttcttttctgtctgtctgcatctgcctttcttttgtaagaacactgatcattatatttagagctcacccagacaatccagtatgatctcatctcaagattcttaattatatttgcaaagacttttttttctaataaagtaatatttgcaggctccagggatttgacacagacatattggaggggtggggaatggcattcaacccagtacaggtttttactctagtgctctgattccaaaatctgtgctctgctctactctacagtatcttgtgaagtgacatggagaaaatccattttcccttccgcatggtaagaaaagactggctttctctctcagtgctgtatctcctttgccttgcatggtaccttgtatagaggaagtgctcagtaaaacggaatggccttattgatgaatgacccatcgaatgtatgaaggtagttttgctgtctcccattgcttttctccaggctgaacatccccaggtttcttatgtgaagttcagaacctctcaccattctagttgtcctcttggagatattttccagtttggccaatattcctcctaaaatatgcctttcaggttgaactctagataagacctaagtaacagatgtaggggaagcaaaatttcacccctaccttcttagggtttttggctgggcttaaaaattaaattgatacaaggcagattaatagaagaaaagcatacaaatttatttaatgtaagtttttttgtgacatgggagccctcataaggaaatgaagacccaaagatgaagttagaattgaacacttatatatggaattggataaagagtagtaaattgtgaagatgtgacaaggcaaagggccttgggccaggatatttaactgggtggagaggtgacgaggaaaataagagctagtttaataaggtttgtttgtacagagttctcttggtctcagtrtcccgcccttgatgataagaatgttactttccttctggtgtcaggagaatattttccatacagggattttagctcttgcttttatgaagaaaaagaagagggtcagaaaacccttcttgcacctgctgtttttttttttaaattatttttttataagtgcctttagcttgaaaataattcttatgccaatgtggtatattttggggtggcatattctgccacctttcacccagtagaatgttaattctcatggtttttacactgtattgctttaaagtagctgtagattgtgtttactttagagcagctgctaaagtcattgctggtgattaataactacagacatttttttaaaaacctctcctcatattagtagctctacttagtcattgagtttttaggccaaattcaaccctcagttttgctagtaccatttttattgattttggattctgggaatggattttgagtttggaaagaaaataatccgaacatcacactcgggctttagtagaaagggcaaacatactcatgaatatatccggtttttcctctccattccaatttgttgatcccatggaaaaaagttctatgctgtaagagagatgaataatgatccaaaaacaattttctgcaagaacaaatcagaattttcatgaccaaatattagagaaaaagaacctttttcttctttatttccacccattgtggcatgtagttggtacagtctttttttttataagtcacatttaccaactgcttatattaattttcatgtacttataccctgaacaaatttatgctcttggtattgtatgtgctgcaagtttcactgctgtcaaaacatatttttaaaaataacccatggattttaaccagtacagtcaagataaattagattttttaaagtaaaatctaccttaatatttagatcagcaagaaaatgtgattatgattaacttttgcccttatgtggcaagataggacagaggtatactaatgtttaaaaattttttttaaaaattaattttctaaactagggattgaaataaggaaagacaataagtcccaatggtagacttgatggcgtcatttactccattatatcttctactgtgtcctgaggcctttgtcttaatggtttctttgaaaggaaacattctgaggagaaaagtcctccacttgtcactcttctctctcacctcttatctggctgctctaatacttctgaccttaacttaaatgtctcttcctcagagaaacctttactgacctgaaagacttggttagttcttatattgtaagctcttttagtaccttctacttcgttttttttcaggcttcattacattaatctcaattgcttgttaatctttgtcctttatcctagactgtaaactctaagagggcaggggctgtgtctgttttcagcattctacccatttcagtgtctggctcataccacatgcttactaaacatttcttgactaattggctggaggatgaaaaaagtcatgtaagrgtatatgggaacagtaattttaacaattatttgcatttgcatttgtgtatgtatggacactaaactaatagtggtgaacttttttctctttctctctctctttccttttctctctctctgtctgtgttttgagtaccactgcatcaaattactgaagtagaaagaatggttgacattctgttttaaagtgaccatgtatttgacccacttcttctctagtaatgtcatcacgattgtatctcattgctgtgggttctcggaggctgacaggcggaacaagttgcttcagcacacagtcctcatctgtcatacagaacagcttgcagattcttattatgtgaatgaaatatggagagagggatatttttcttcctggactatcagggtaattgaaagtaaccatatcagggcatgaaggggaaatgcaggaaaatagactgcctttgtgaagggcaactcatctgctctcagaactgcaggtgtggagcctcatctccaaatgcaaaggcttgggaagtgtttcccgttatcaaaaggcctgagatttgactagcaccttctttcagtaaggaaaatgccttgcttctcattaccacccctcagcgcctgatgagatgccacgactgttatctttggaggcacatcccatgggactaggggcacagggctttttgtgttctttagacagggaagaaaactgttttagtattccagatcaataaactgtagtagaaaattggaaatgtgctatggaaaatcattaagcagagaaattctactgttcctgagttttgtatcagaagaaataaataacacttgactgctcttatagttaatattttataagcttggccctggtgaaatagaatatcagatcatactgtatcaatgacactttaccttaaatggtttggttctgtagatagacattgtatttatagaattgttttagttaacaggaagctttttatttaacactggtgaaaagtactaacatggtgatggaaaacaagctacaactcagcagtcattcaagtcatgacttcgttatattttgagatagctttaaaatcacttagtccaataaaactctaaagtactctaacttccacgttgctttatctaatttatgaaacaggcaaaggaatcaacaataaccctccatttaccattattagattagctattactgaaaccgcagaaagtatataacgcttaactttgtgttcacttgaattggttattaagctttgatggaactttcatttaacccaatgcctttgtttacaacaagaagcatgttaagtctattgtgttctgaatttggtatgaccattttagaacatgcctcctgcaaaggcatgttaaagttacagattctattcatttgtgttctgtcaaatattttcaatttaatccagttaaggtctcatttttcttcccaactttcaaaaaaawatatatatttttctctatgaggccgctactttttcaagaatataaccaggcattaacaaacatgaaactactcatagcaactccataaaaattgatttttcaaaattgaataagcatctggtggtctgaaaatgttttatacctgatatttaaaagatattttgactgttgccaaaaggaatcaattccttcatgctgtttcccttgcggatgctgtcatatgccactgtgttgtgtagagcacaggctctggaggaagggcagacttggatttgcacttaaactctgccgcttacatgcctgtgaccttgactttacctcttaaggaggtcagtgaactgtaactgccctttcctcagtgtgttacagagttcataatagtacttatctcatggtgttatataagagaagatgcatgtaaaaacctcaaacatgtggctattactataattaatgtatgtatatatatatgtgtgtgtgtgtgtccatccacactgtatgtatatatgtacatgctgccgatttgagtgacacattattgattctaaattaggttacactggtggaaatgctgtcatcctttcagtgcttaatgttctggtatcatggccatatctaaaagtaacatgagctggatgtggtggctcatgcctgtaatcccagcactatgggaggccaaggcgggtggatcagctgatgtcaggagtacaagaccagcctggccaacatggtgaaaccccgtctctattaaaaataaaaaaattagctgggtgtggtggcatgtgcccgtggtcccagctacttgggaggctgaggcaggagaattgcttgaacccgggaggcagagtgagccgagatcatatcgttgcattccagcctgggcgataagaatgagattccatgtcaataaaatraaataaaataaaataaaatagtaacataagcatggttaccattttgggtctagtcagagccacagcttgaaaacaaattaccatgtaggtagtcatttcagttgctgagattggaacccatgaaccaaatccctactccaaagaagtattacttttaaagtggaattttatttcagttcttttgaattgacataaaaactagaataaggaatgttgtagatatgtgaactagaactatacggcccttagggatcccagctacaatatattgtttttcactgaccttacttatttcccagatctattaagcttctatctgccttgctgtctttgcatttttcatctttatctctatccttgacatccacgtttttggggtagtagagatgggcttgggtaaatacatactatttcacccagtgtgctttggaccagtaacccatagaggagcaatgggaagtcttgctgggagatctgctctctgacattggtttccagcaaatttatatggttcttaagaggggcagaatttttccccttatctgtatcatattctgttggcttgaataatgagtcacagaagaatgaaaacttctttagctgtgaaagtttcagcaagaataagtgttagacccatcgtgttagtataatgcaaaataagatagcatttaaagatagtctctgcttcagcatcatattgacaatgcccctcactcgagtcagggattggggacttactgagatacaccatctggcaaaatgtggaaggccagttttgtgccaactgaaaaagctgcatcagttccaactcttgtgtactttgcacattattggatgccttgcaaaaatgtttatcactttttaattaggaagggctaagggacttcagtaccccaaagaaaatgtcagcaacccaaagatagaaaaattatccagtggattacaaggggcagtaagtatttaactttgagctcgcacatgaaatgaggacagtttcatactaggatctgtgctgggggacatgagggtggtatgtatttggtctgtctgggtggaactggggatctggtctttctgttattctgacagtttctcagattgtttcttctggagcatggtcagtccttgaaaacacatgccaagaggtcaactctgttctgctgcttggcctatcatgcaaactgtggtctgtcatgttcattaaaatgaaaatttgtcgaatggaatttgtccgactggcagaatagtttaaatgtcagatgttgttaggcctggatataaatattatgtttctattgttaattaattgcagcacctcagtaccagtgatccaaaatccaatttagtctgcaataggcctgtggataagggccagagataatgaatgcagaaggaaaaaatgtattcacaattttcattgtatctgtcaatgtcctcttagaaaaatagcaaattttggtatgtcactgtagttcaagaggtgcaaaacaggacagaattaagacccattgtcttttgaaacctctcaaatattacttactatcaaatctattccactgctagcgctaagtctgtcccagcatcaaaattcgtgacagatgctgccctgttccgttgccttgattccccccattgtttccacccttgagtctgttgttatgttcacagctcatttcagagttgccggactgaagtatctagtactgtaatcctcctcatttttctttgcagtattcatttcccactcctcgtcttgtcatcaacccttcctttctttttcttttcatcctttgttttggtccccaggctcagcagcctgtctatcaagtctgccactgtttgttaagatcattttgcttccaaattgagctggtggctgaatatcactcagaataacgctgctagaactgtctgcattagtaaagagagcagaaatcttgccgctggtgcccagacctcagagctgactgttgttgcaaagccatgagccagcaggcatttgtgaccgccattctctaccaatattttgttgaatacttgctgtgagcatggcaccttacccggccacctccctrgtggtaggtgtgccaggcacaggaagactaattaagactttggaaggcaggactaatgtgttccagtggtcagggaccctcatttaattcctggcatcctggtccatgccaaccttgttctgcccctgtgattatgccagccatgaagcaggaaagggaagatgaactttggtctgctctgagtttccctgtccgcagtgtctgtcagattaaaaatgagagggaaggagactagagagtcttccagatggagagttcagaggagggcacaaccagactccctctccgcagtgacgttgctgggccatccgagcactgggccaggagccaggagcagaggctgctgcctgaccctgcagtggagtggggacctggcagaatggtcacccttggctcagggtaggagcagattcaaatcaggtgcacacaggccacgtggtggaggtggaatgtttacccccaaggctgggtcagtctggttggacgttggaccccactcttcttaagggtgctttccccaagtcacatgtgggtagagttggcaactgtagaaaccaaatggggagytggtattctccaacctctctgttttcttcctttagaatgaggcaggcatgcaggaaaggtgaccttagttaggctggaggcagcagtaacagtggtggccctgcatccttggactgacttgcatgttccagtcagcaggggtttggtaaggtactgacagtcactcttcatgcctcttggtagcacaactttataaccagtttcagcattcattgaaaagtatccagtgtagatgctccaggaacagagttttgcttaaatgtgaatgactttttaagtctaaggctatctgaggtctatgtaatgatggaaaggtaataaatgaagttaaacactgaatatctggttttgccttccttataaatggattgttttaatattgcatctgcaaaacatcagtttctccccaagatgaacctctttttctcaaattcaggctattagagtttgggagaggacctgtgctattgggaacagagctatttgacttaaaatgtcatcccgttctgagaaaacatactggggccatgttagggcatccctgtgcaaatgccacattgtcagaatgtctccccctggggttagactagccatggcaccttccagtcctgttggggtggcacaatttactgcttacccattgcctgggcaccaacccagccagggtcagggagccawgctccctgagatttcatggaatttgatttgtctgtgactctatgaattttcagatgctaattattggctgattggtattctgctcctcagatgtcacctaatgattttccagagcttctgctacttggtaaatttatttttctgatgcatggcaaatatgacagcattgaatagatgtggcaagggcatgtcgtgttgtgtgtatgtgtctcaggccatagaagggtaggcttcagtagagagataacttattgttttgtgaaagcatggggtacaaattaagagaatgaatgaaaaccaagaacaaaactcaaaactaacctttccttaataatttgcaatcaattttcattcctagtaatagtgaaaacttataatattcttttattaaagaaattttacggagtatatgtgccagacagtgttctagaagatgtagatttaatatagaacaagacagatgtggtccgtattattgctgaacttatggtcaaatagaaagactttcacctacattttaacaatattgattagctccccaggtaaataacaaaagtaagaattattctggtcacctccctggactctaaatgtatctgagtttcagaaattctgaaaatattctgtaagaaatgcatacatataaattgaaataaaacttctaggaatatatctgagaagtgttaggtttttggggcctttgctgctatgtcttatgagggtttaaattattatgcagattcttaaataattccatgtgtttaaagtattaatttattattatgtggtttaaccagggctgtgttttccaactgcctggttttcaccgatatgcaggaaaaggttttagaaaggggtttaagaatcttctcttagttgaaaattggctatcatttgaaaraatgctgcaataatttgtctgcagtaacagctcactgaacgtagcataaaaatgaaaacgagggctgaatttattcggtgtcttcattcttgtacctgaatgcacagactctttcctaggtatgtaaataattgttaaagacttaaaggtcaataaccaattccttaacgtggcagttaagtcaggtgagggctgcagaatgcaacaatagaggcaaatccctcagttccaggtaatgttgccttaagaatggtgcagttggatggtacccagagaaaggtttctactgggataagatgagtcaccatcaaagcaggtttctatatttcggaaagatatttgtttaaattcagacctatttttaagggagctggggtttggatccatggattgagaggcttgaggtttgtaaagattttttggagggctatcctctgaaaaatcagcaagataaatcagtgtgttactggcctgtactgctctacttccatgtttatttcttttaggagaactgaagcccaaagtwtttggattcatttaaatttaatttatgtcttgcaggaggtcaaatgaaggatacagagtttgtctgctctagaacaaaatatggacgaattaggcatgaggaaagtgggaagtggtataatattgtaactgtaggtgaaaatgttttcatggcctgtagtttagatccttggatttttaggtcaaggaaaacatgggaaagagagggctaatttgagtggctattcctgactattgtctagatatctatactctggaacaagaacttttgggttctgacttgctcgcattttggatagccaggacacacacaaacacacacacacacacacacacacacacacacacacatttttagatttacacaaagatgtacacaaagatgatagaatctgcttgtattagtttattcaacaagtatggttgtgtgccacataatgwcatttcagtcaatgatggactgcaaataggaccatggttccataatattataataytatatttttaccataccttttatatgtttakatgtttagatacacaaatacttatcatcgtgttataattacttacagcatttaggacagtaacatgctttacaggtctgtaacctaggagcaataggctataccatataggataagtgtatagtgggctacactttctaggtttgtgtaagtacatgcagtgatgtttgcacaatgacaaaatcacctatgggtgcatttctcagaatatactcccattactaagtgacacatgagtgtttattgaatgactgttgggtgctgggatagaatctggggttttcaatgtgtgagtaaggtggggttggtttgaacaataaaggccatacattttatagagcttagattctaattagggtgagaaaacataaacacacgataaagtagtgcattaagacaatagcatgggttcctatcataagacactatatgattacggtgaggccaaagctcagtttaaaaccagtcctaccacctgtccctttcaaccttctcaggaaccttcagtactggttaccctttctcttctacactcactctgcatcttaaatagatcttctccattaccttgatacatactcggccttttttctgtttaaaaactatacaaacaaaccgtcttccagccctttgtcctttagttgccactctttcctccccagtcacagccaagcttatctaggattgtctttactcattgtctttgtttaatgacttccacttctgtcttaaccaactccaaactgaattctgcctccatcagtccacaaaacagttcctgctgagttcctcgatgaccttcctattgggctttttttagtatttatattgcttgacctttctgtgaatcttgaggatttagttttacttctctggcaactgttctctctcttatgtaggattcatcctcctcaacacaactgttagatgttgaacttgctcacggatcagtcctaggcccttttgtctttctacttatactgactccctggacagtcacatccatattcacaactgcagttacttcctacttacagataacttaccactctcagacctcccctcttagctacagtcccatctacccaactgcttacctggatattttcctttagatgtctctaaggcacttcaaattcaatgtatccacaaccaaattagtgatctcttttgactccagatgtggaccttcatccagtgggatttagttaaggtccttgtctaatcccaattcacaaagggaaactgtcataaaattgtaattttcaaacatattttaaaaatcatatttagtaattcttttccaactttaatgcattataataagaaacctttgatatctattgtttgatattcattgaaactactttcaggcctactatatgtttaatttttgcttatgtttcatatgtgcttgtaaagaatgttgtggcagattgtattttccaaaggtgatcacatcagcacatttatccaatcctgtgctcttcttacagtgtaacagacactccctcattgagggcggcaaggctgttgttctctttcttttagtctgggtgggggtttgtgactgacctgaccagtggagtgcagtgtaaatggtgttatgtgatttctgagcctaggtcataaaaaatacagcttctctcagaactcgtctttggaactcagccaccatgttgtgaggagactcaagccacatggagaggccacatggacatattccagctgctagctctagctgtggtctcagctaaccctgagcaacaactggcagatatgtgagggcatgagtcttcagatgatcccagcccctagcttagatatttgagggcatgagatatcagatgattccagcccctaactttcaagtctgctagcggaagcctcaggctttgtagcatacagaaaagccatcctgctgaaccctgccaggattcttgatccgtagaaaccgtgagagataataaattcttacttttatttttatttttttattttattattattatactttaagttttagggtacatgtgcacaacgtgcaggttagtcacatatttatacatctgccatgctggtgtgctgcactcattaactcrtcatttagcattaggcatatctcctaatgctatccctcccccctccccctaccccacaacagtccccagagtgtgatattccccttcctgtgtccatgtgttctcattgctcaattcccacctatgagtgagaacatgcggtgtttggttttttgtccttgcgatagtttactgagaatgatgatttccaatttcatccatgtccctacaaaggacatgaactcatcattttttatggatgcatagtattccatggtatatatgtgccacattttcttaatccagtctgtcattgttggacatttgggtcggttccaagtctttgctattgtgaatagtgctgcaataaacatacgtgtgcatgtgtctttatagcagcatgatttatagtcctttgggtatatacgcagtaatggcatggctgggtcaaatggtatttctrgttctagatccctgaggaatcgccacactgacttccacaatggttgaactagtttacagtcccaccaacagtgtaaaagtgttcctatttctccacaacctttccagcacctgttgtttcctgactttttaatgattgccattctaactggtgtaacatggtatctcattgtggttttgatttgcatttctctcatggccagtgatggtgagcattttttcatgtgttttttggctgcataaatgtcttcttttgagaagtgtctcttcatgtccttcgcccacttgttgatggggttgtttgtttttgtcttgtaaatttatttgagttcattgtagattcgggatattagccctttgtcaaatgagtaggttgcaaacattttctccgattctgtaggttgcctgttcactctgatggtagtttcttttgctgtgcagaagctcttgagtttaattagatcccatttgtcaattttggcttttgttgccattgcttttggtgttttagacatgaagtccttgcccatgcctatgtcctgaatggtaatgcctaggttttcttctagggtttttatggttttaggtctaatgtttaagtctttaatgcatcttgaattaatttgtataagatgtaaggaagggatccagtttcagctttctacatatsgctagctagttttcccagcaccatttattaaatagggaatcctttccccattgcttgtttttgtcaggtttgtcaaagatcacatagttgcagatatgcggcattatttctgagggctctgtactgttccattgatctatatctctgttttgctaccagtaccatgctgttttggttactgtagccttgtagtatagtttgaagtcaggtagagtgatgcctccagctttattcttttggcttaggattgacttggtgatgcgggctcttttttggttccatatgaactttaaagtagtttattccaattctgtgaagaaagtcattggtagcttgatggggatggcattgaatctataaattaccttgggcagtatggccrttttcatgatattgattcttcctacccatgagcatagaatgttcttccatttgtttgtatcstcttttatttcattgagcagtggtttgtagttctccttgaagaggtccttcatgtcccttgtaagttggattcctaggagcaattgtgaatgggwgttcactcatgatgaggctttctgtttgtctgttattggtgtataagaatgcttgtgatttttgtacattgattttgtatcctgagactttgctgaagytgcttatcagcttaaggagattttgggctgaggtgatggggttttctagatatacaatcatgtcatctgcaaacagggacaatttgtccacttcctcttttcctaattgaatgccctttatttccttctcctgcctgattgccctggccagaacttccaacactatgttgaataggagtggtgagagagggcatccctgtcttgtgccagttttcaaagggaatgcttccagtttttgcccattcagtatgatattggctgtgggtttgtcatagatagctcttattattttgagatatgtcccatcaatacctaattyattgagagtttttagcatgaagagttgttgaattttgtcaaaggccttttctgcatctattgagrtaatcatgtggtttttgtctttggctctgtttatatgctggattacatttactgatttgcatacattggaccakccttgcatcccagggatgaagcccacttgatcatggtggataagctttgtgatgtgctgctggattcggtttgccagtattttattgaggatatttgcatcaatgttcatcaaggatattggtctaaaattctctcttttggttgtgtctctgccaggctttggtatcaggatgatgctggcctcataaaatgagttagggaggattccctctttttctattgattggaatagtttcagaaggaatggtaccagttcctccttgtacctctggtagaattcggctgtgaatccatctggtcctggactctttttggttggtaagctattgattattgccacaatttcagagcctgtyattggtctattcagagatccaacttcttcctgstttagtcttgggagggtgtatgtgtcgaggaatttatccatttcttctagattttctagtttatttgtgcagaggtgtttgtagtattctctgatggtagtttgtatttctatgggattggtggtgatatcccctttatcattttttactgcgtctatttgattcttctctcttttcttctttattagtcttgctagctgtctgtcaattttgttgatcctttcaaaaaaccagctcctggattcattaattttttgaagggttttttgtgtctctatttccttcagttctgctctgattttagttatttcttgccttttgctagcttttgaatgygtttgctcttgcttttctagttcttgtaattgtgatgttagggtgtcaattttggatctttcctgctttcttttgtgggcatttagtgctataaatttccctctatacactgctttgaatgggtcccagagattctggtatgttgtgtctttgttctcgttggtttcaaagaacatctttatttctgccttcatttcgttatgtacccmgtagtcattcaggagcaggttgttcagtttccatgtaattgagcggttttgagtgagattcttaatcctgagttctagtttgattgcactgtggtctgagagacaatttgttataatttctrttcttttacatttgctcaggagagctttacttccaactatgtggtcaattttggaataggtgtggtgtggtgctgaaaaaaatgtatgttctgttgttttgggatgcagagttctgtagatgtctattaggtctgcttggtgcagagctgagttcaatacctggatatccttgttaactttctgtcttgttgatctgtctaatgttgacagtgggttgttaaagtctcccattcttattgtgtgggagtctaagtctctttgtaggtcactcaggacttgctttatgaatctgggtgctcctgtattggatgcatatatatttaggatagttagctctacttgttgaattgatccctttaccattacgtaatggccttctttctctcttttgatctttgttggtttaaagactgttttatcagagagtaggactgcaacccctgcctttttttgttttccatttgctgggtagatcttcctccatccctttattttgagcctatgtttgtctctgcatgtgagatgggtttcctgaatacagcacactgatgggtcttgactctttatccaatttgccartctgtgtcttttaattggaacatttagtccatttacatttaaagttaatattgttatgtgtgaatttgatcctgtcatwatgatgttagctggttattttgctcgttagttgatgcagtttcttcctagccttgatggtctttacaatttggcatgattttgcagtggctggtactggttgttcctttccatgtttagtgcttccttcaggagctcttttaggscaggcctggtggtgagaaaatctctcagcatttgcttgtctgtaaaggattttatttctccttcacttatgaagcttagtttggctggatatgaaatgctgggttgaaaattctttcctttaagaatgttgaatatgggcctcctccactctcttctggcttgtagaatttctgccgagatatccgctgttagtctgataggcttccctttgtgggtaacccgacctttctgtctggctgcccttaacattttttccttcatttcaactttggtgaatctgacaattatgtgtcttggagttgcccttctcgaggagtatctttgtggcgttctctgtatttcctgaagctgaatgttggcctgccttgctagattggggaagttctcctggataatatcctgcagagtgttttccaacttggttccattctccccatcactttcaggtacaccaatcagacgtagatttggtgttttcacatagtcccatatttcttggaggctttgtttgtttctttttattattttttctctaaacttctcttcttgcttcatttcattcatttcatcttccatcattgatacyctttcttccagttgatcgcatcggctcctgaggcttctgcattcttcacrtagttctcgtgccttggctttcagctccatcagctcctttaagcacttctctgtattggttattctagttatacawtcgtctaaatttttttcaaagtttttaacttctttgtctttggtttgaatttcctcctttagctcggagtagtttgatcgtctgaagccttcttctctcaacttgtcaaagtcattttccatccagctttattccgttgctggtgaggaactgygttcctttggaggaggagaagygctctgctttttagagtttccagtttttctgctctgttttttcccatctttgtggttttatctacttttggtctttcatgatggtkatgtacagatttttggtgtggatgtcctttctgtttgttagttttccttctacgagacaggaccctcagctgcaggactgttggagtttgctagaggtccactccagactctgtttgcctgggtatcagcagcagtggctgcagaacagcggattttcgtgaaccgcgaatgctgctgtctgatcgttcctctggaagttttgtctcagaggagtacccggccgtgtgaggtgtcagtcagcccctacttgggggtgcctcccagttaggctgctcgggggtcaggggtcagggacctacttgaggaggcagtctccccattctcagatctctggctgcgtgctgggagaaccactgctctcttcaaagctgtcagacagggacattgaagtctgcagaggttactgctgtctttttgtttgtctgtgccctgcccccagaggtggagccyacagaggcaggcaggcctccttgagatgtggtgggctctacccagttcatgcttcctggcagctttgtttacctaagcaagcctgggcaatggcgggcgcccctcccccagcctcgctgctgccttgcagtttgatctcagactgctgtgctagcaatcagcgagactccgtgggcataggacccttcgagccaggtgtgggatataatcttctggtgcgccgtttcttaagcccatcggaaaagtgcagtattagggtgggagtgaccctattttccaggtgccgtctgtcacccctttctttgactaggaaagggagatctctgaccccttgcacttcccgagtgaggcaatgcctcaccctgcttcggcttgtgcacggtgctctgcaaccactgtcctgcgcccactgtctggcactccctagtgagatgaacctggtacctcagatggaaatgcagaaatcacccttcttctgcattgctcatgctgggagctgtagaccggagctgtttctattcggccatcttggctgccagccaccacttttatttttaaatatctagtttttggataatttgttatatgtcaataaaaaacgggggatggagccaagatgaccgaataggaacagttccagtctacagctcccagtgtgagcgacacagaagatgggtgatttctgcatttccaactgaggtaccaggttcatctcactggggagtgcaatacagtgggtgcaggacagtgggtgcagcgcactgtgtgtgagccgaagcagggcgaggcattgccttatccgggaagcgcaaggggtcagtgaattccctttcctagtaaaagagargggtgacagatggcacctggaaaatcaggtcactcccaccgtaatactgcacttttccagcaggattaacaaacggcacaccaggagattatataccgcacatggctcggagggccctacgcccacggagcctcactcattgctagcacagcagtctgagatcaaactgcaaggcggcagcgaggctgggggaggggcgcctgccattgccaaggcttgagtaggtaaacaaagagaccaggaagctcgctctgggtggatcccaccacagctcaaggaggcctgtctgcctctgtaggctccacctctgggggccgggcacagacaaacaaaaggcagcagtaacctctgcagacttaaatgtccctgtctgacagctttgaagagagtagtggttctcccagcacgcagcttgagatctgagaatgggcagactgcctcctcaagtgggtccctgacccccgagtagcctaactgggaggtaccccgcactaggggcgttctaacacctcacacggccgggtactcctctgagacaaaacttgaacgatcaagcagtagcatttgcggttcatcaatatccgctgttctgcagccacggctgctgatacccaggcacacagagtctggagtggacccccaggaaactccaacagacctgcagctgagcatcctgactgttagaaggaaaactaacaaacagaaaggacatccacaccaaaaacccatctgtacgtcaccatcatcaaagaccaaaggtagataaaaccacaaagatggggaaaaaacagagcagaaaaactggaaactctaaaaatcagagtgcctctcctcctccaaaggaacgcagctcctcaccagcaatggaacaaagctggatggagaatgactttgatgagtcaagagtagaaggcttcagatgatcaaactactccgagctaaaggaggaagttcgaaccaatggcaaagaagttaaaaaccttgaaaaaaaattagatgaatggctaactagaataaccaatgcacagaagtccttaaaggacttgatggagctgaaaaccaaggcacgagaaccacgtgwcgaacgcacaagcctcagtagccgatgcgatcaactggaagaaagggtatcaatgatggaagacgaatgaaatgaagcgagaagagaagtttagaaaaaaaataataaaaagaaacaaacaaagcctccaagaaatatgggactatgtgaaaagaccaaatctatgtctgattggtgtacctgaaagtgacggggagaatggaaccaagttggaaaacactctgcaggatatcattcaggagaacttccccaatctagcaaggcaggccaacattcagatttaggaaatacagagaatgccagaaagatactcctcaagaagagcaactccaagacacttcattgtcagattcaccaaagttgaaatgaagtaaaaaattttaagggcagccagagagaaaggtcgggttacccacaaagggaagcccatcagactaacagcggatctctcggcagaaactctacaagccagaagagagtgggggccaatattcaacattcttaaaggaaagaattttcaacccagcatttcatatccagccaaactaagcttcataagtgaaggagaaataaaatcctttacagacaagcaaatgctgagagattttctcaccaccaggccagccctaaaagagcccctgaaggaagcactaaacatggaaaggaacaaccagtaccagccactgcaaaaacatgccaaattttaaagaccatcaaggctaggaagaaaccacatcaactaatgagcgaaataaccagctaacatcataatgacaggatcagattcacacataagaatattaaccttaaatgtaaatggactaaatgctccaattaaaagacacagattggcaaattggataaagagtcaagacccatcagtgtgctgtattcaggaaacccatgtcatgtacagagacacacataggctcaaaataaagggatggaggaagatctaccaagcaaatggaaaacaaaaaaaaaggcagggtttgcaatcctagtcactgataaaacagtctttaaaccaacaaagatcaaaagagacaaagaaggccattgcataatggtaaagggatcaattcaatgagaagagctaactatcctaaatatatatgcacccaatacaggagcacccagattcataaagcaagtcctgagtgacctacaaagagacttagactcccacacaataataatgggagactttaataccccactgtcaacattagcagatcaacaagacagaaagttaacaaggatatccaggaattgaactcagctctgcaccaagcggacctaatagacatctagagaactctccaccccatatcaacagaatatacatttttttcagcaccacaccacacctattctgaaattgaccacatagttggaagtaaagcactcctcagcaaatgtaaaagaacagaaattagaagaaactgtctctcagaccacagtgcaatcaaactagaactcaggattaagaaactcactcaaaaccactcaattacatggaaactgaacaacctgctcctgagtgactatggggtacataacgaaatgaaggcagaaataaagatgttctttgaaaccaacgagaacaaagacacaacataccagaatctcttggacccattcaaagcagtgtrtagagggaaatttatagcactaaatgcccacaaaagaaagcaggaaagatctaaaagtgccaccctaacatcacaattaaaagaactagagaagcaagagcaacactcaacactagcagaaggcaagaaataatgaaaatcagagcagaactgaaggaaatagagacacaaaaaacccttcaaaaaattaatgaatccaggagctggttttttgaaaagatcaacaaaattgatagacctctagcaagactaatgaagaagaaaagagagaagaatcaaatagacacaataaaaatgataaaggggatatcamcaccratcccacagaaatacmaactaccatcagagaatactaggaacacctctatgcaaataaactagaaaatctagaagaatttgataaattcccrgacacatacaccctcccaagactaaaccagaaagaagttgaatctctgaatagaccaataacaggctctgaaattgaggcaataagtaatagcttaccaaccaaaaaaagtccaggaccagatggattcacagctgaattctaccagaggtacaaggaggagctggtaccagttcttctgaaactattccagtcaatagaaaaagaggaaatcctccctaactcattttatgaggccagcatcatcctgataccaaagctgggcagagacacaacaaaaaaagagaattttagaycaatatccctgatgaacatcartgcagaaaycctcaataaaatactggcaaaccgaatccagcagcacatcaaaaagcttatccaccatgatcaagtgggtttcatccctgggatgcaaggctggttsaacatatgcaaatcaattaacgtaatccagcatataaacagaaccaaagacaaaaaccacatgattatctcaatagatgcagaaaaggcctttgacaaaattcaacaactcttcatgctaaaaactctcaataaattaggtattgatgggtcatatctcaaaataataagagctatctatgacaaacccacagccaatatcatactgaatggacaaaaactagaggcattccctttgaaaactggcacaagacagggatgccctctctcaccactcctattcaatatagtgttggaagttctgtccagggcaatcaggcaggagaagaaaataaagggtattgaattaggaaaagaggaagtcaaattgtccctgtttgcagatgacatgattgtatatctagaaaaccccatcgtctcagcccaaaatctccttaagctgataagcaacttcaggaaagtctcaggatacaaaatcaatgtgcaaaaatcacaagcattcctttacaccaataacagacaaacagagagtgaaatcatgagtgaactcccattcacaactgcttcaaagagaataaaatacctaggaatccatcttacaagggaggggaaggacctcttcaaggagaactacaaaccactgctcaatgaaataaaagaggatacaaacaaatggaagaacattccatgcccatgggtaggaagaatcaatattgtcaaaatggccataatgcccaaggtaatttatagattcaatgccatccccatgaagctaccaatgactttcttcacagaattggaaaaaactactttaaagttcatatggaaccaaaaaagagcctgcatcaccaagtcaatcctaagccaaaagaacagagctggaggcatcacactacctgacttcaaactatactacaaggctacagtaaccaaaacagcatggtactggtaccaaaacagagatatagatcaatggaacagaacagagccctcagaaataatgccacatatctacaactatctgatctttgacaaacctgagaaaaacaagcaatggggaaaggattccctatttaataaatggtgctgggaaaactggcagccatatgtagaaagctgaaactggatcccttccttacaccttatacaaaagttaattcaagatggattaaagacttaaatgttagacctaaaaccataaaaaccctagaagaaaacctaggcaataccattcaggacataggcatgggcaaggacttcatgtctaaaacaccaaaagcaatggcaataaaagacaaaattgacaaatgggatctaattaaactaaagcacttctgcacagcaaaagaaactaccatcagagtgaacaggcaacctacagaatgggagaaaatttttgcaatctactcatctgacaaagggctaatatcccgaatctacaatgaactcaaataaatttacaagacaaaaacaaccccatcaaaaagtgggaaaaggataagaacagacacttctcaaaagaagacatttacgcagccaaaagacacatgaaaaaatgctcaycatcactggccatcagagacatgcaaatcaaaaccacaatgagataccatctcacaccagttagaatggcaatcattaaaatgtcaggaaacaacaggtgctggagaggatgtggagaaataggaacacttttaccctgttggtgggactgtaaactagttcaaccattgtggaagtcagtgtggcgattcctcagggatctagaactagatataccatttgactcagccatctcattactgggtatatactaaaaggattataaatcatgctgctataaagacacatgcacacgtatgtttattgtggcactattcacaatagcaaagacttggaaccgacccaaatgtccaacaatgatagactggattaagaaaatgtggcacatatacaccatggaatactatgcagccataaaaaatgatgagttcatgtcctttgtagggacatggatgaagctggaaaccatcattctctgcaaactatcrcaaggacaaaacaccaaacascgcatgttctcactcataggtgggaattgaacaatgagaacacatggacacaggaaggagaacatcacacactggggaytgttgtggggcggggggtgggtgggatggcattaggagatatacctaatgctagatgaygagttaatgggtgcagcacaccaacatggcacatgtatacatatgtaacaaacttgcacgttgtgcacatgtaccctaaaacttaaagtataataataataaaattttaaaaaaagaatataaatactttctcttctattattgctaactttcgtcatgcctaacaataacttattccgtcagcttttttttggttcctatttccgtggtgtgtacttatccacacttttcttttcaaaacttatgtttaaatttgtttcttataaacaacacatagcaagattttaaaacattcgttttgataaaattttaacagatgtacttaccctgattcctgacacagctggacttagttaaaatattttctttttyatattctattcagcgtgttttcctttgcttctttctcccttccatttcaatgttgtatagagaatcgattgcgtttactctatgttgtttcctctattgatttggaaatttctgttcttttggtggttactcttgtatgttttaaaattcggaaatagagcctacatgcaaaataatttgtgcaagtgtacatatacagtttaaagaaaataataaactgattgtccagatacctctttctaggccaagaaacagatcattaccatattccagaagcccccccattcctctcacgtattccatctcctctcccactctcaagataaagatagcctgaattctgtgtaaatttcttccctttctttattttgttttgtaccacttatactttatattcaaaaacaacacagtatttatttttgcctttttgaatgttatacaaatagaataatatgtatagctttctgtgacttgcttcttttgttttacatyatattttgagaggtatctatgttgatgtgggtaactttcactgattttccaaagttatataatactccattctaagaatatgtaaaaaaagtgtttatcgtattgctgatagatgtttgggttgttttctgtattttttgccatcctggcaatacatttgtagaatgtaaacattgtacaaatctctgtgartacatgtgtaagggcctctttgcttatayagacagagaaagaaatgctggttatccttaacaagttaatcagtagttttagtgcatatctttaatgccttaagtagtatttctctcctccttgtaaacaatttattacccccttctttattccatatgattgtgataaaccactcagtttcactttattggcaaatgctaaaaattgttttgttttgtttttttacaagtagrgcttaataattattaatcaatacccattacttattattaaagttaccagatttaccatcatgcttactaatttctctgttyactattgcttcttgtttctcactgcttccttctgggataaattcccgcttattcaagcatatcttattttagtatttcttttggcaaaagtaaactactgtgagcactaaacarttttttttttgaaaaatgttctgatttatctattgttctctatcattcttgaatgttaggtttagcatgggcatatamtttttctttttttttttttgagaaaaagtttctctcttgttgcccaggctggagtgcmatggtgcaatttcagctcactgcaacctctgcctcctgggttcaagctattctcctgcctcagcctcctgagtagctgggattacaggtgcccaccaccacgcccagctaatttttttttttttttttttttgagacggagtctcgctctgttgcccaggctggagtgcagtggtgcgatctctgctcactgcaagccccgcctcccaggttcacaccattctcctgcctcagcctcccaagtagctgggactacaggcgcctggtaccacrcccrtctaattttttgtatttttagtagagatggggtttcaccrtattagccaggatggtctcgatctcctgacctcgtgatctgcctgcctcggcctcccaaagtgctgggattacaggagtgagccaccgcgcccggcctgtatttttagtagagacaaggtttcaccacgttggccaggctggtctcaaactcctgacttcaggttatctgcctgccttggtgtcccaaagtgctgggattacaggcgtgagacacagtgtccgcactgttgctttactttcatttttgctaatgacatgttcttttgctagaagtctcttttttttccctctctggttgactttaagattttatttttatctctgcgttctgtggtttcattctgatatatgaaagtatgcatttgcttttatttatctttttgagatattgttatactttttccagaggactcatgtctttcattctagaaactctacatccatatatttttatattggctttctctctctctttttttttttttaacgaaaaagtaaactttaatgtcaaaaatgcaaacttggggaagaacagaaaagatcasacacaaggctgtcacttcacacttggaaggttgcacagcgtccgggcagaggcgctcctcacttcccagatggttgggcagccgggcagaggcactcctcacttcccagacagggcggctgccgagcagaggcgctcctcacttcccrgacagggcagcggccaggcagaggggcccctcacttcccagatagttgggcggccgggcagaggcgctcctcactcccagtcagttggccagccgggcagaggggctcctcacttcccagatggttggcggctgagcagaggcgyttctcacttcccagacggctttttctctttcttttgggcttggctatatatgtgtgtgtatgtgcgtgtgtgtgtgtgtgtgtgtgtgtatctatgtgygtgtatatatatgtaggtatatatatacacatgtgtatgtatatttgtacaygtgtgtgtatatatatgcacatatgtatatacatacacacacatatatatacacacatacacacacatatatgtattttaagtcattattgtattttgtttagcatttctgtgtttgaagtggaaagggattcagctcaatctccatgttatcagattattcatctcttagatttcacaaatgcaatattacactattttatctaatattctccaaactctgcttgttctaaactcattggtaaacggtgtagctcagggggaaggagaaatttctgatgctgtcccatagaagggacctacctcctgcattaatagtctgaaatttacatcttagcccrtaagtctgacctgttctttggtggtcatgcatcagtggtaatgcattctttgatggaatagagggatgtggagggaaacagcccagtaaaagctaaaacaatcccttcagatattgaaggaaaaaaaaagaaccatggaaaarctgtggtgtagctgtctatccccaactactgcacctttcggagatgttaggacctagccaaaaatgagagaaagaatcatattcccattactggtgactgtagaggcaccttatgagtaagattggatgattaaagaaccagcttcacgawactgtaagttattactgttgcttttgcagatcttttgtcacattgatttgtgtgtggtcagtgcatagtatttatgttttgatcacagagagctgaagttaacaagatttgatttgaaatgtcaagttgtggcttcctctgttttgtgagtttyttccgagagaaggctgcagtctacatacaggaagggtgattgtccctgtaatcatgcacacatatacttacggagcaagtgrtgaggtttatattagaaggaccatgcatgtcatataaatggaataggcatccctaagtgaaactttttcagagaaatggaaatagagcatgcaagaaagatgacaaaaagaaataagaaaataaaatgcttagtcagactgagtatgtcacactcatgtttaatttgattttcatctcgctataagccgttcccattctgttgaggagtacacactccaaaagatttgactgtagatttggccaaggtttgtgtgcttcmattctgggtagatgtgtgcaccattttcagtttctgactgtctttttttggcctyttgtgcgggaggtaygaggcacaagttttatcaatggtttatttggctagcaccatataccatggcatatggaaattctatttagagacatggggagaaaatgtttgttgttgtactcacagacaactctgtctttcatttttatgtctttgtagctttgaagctcaggaaagaagagaaatccactgagaacagtctgtaaaggtaagtgtatttattacatggccttgacaaacattgcctttacaacattgatttttcttttattcagagatttaaacacttggactaaagatatagctgacaggacaacttccttaaccacctgcttgtcctccctcttaggcaaaagtgctgagcaatagttagcagagagcaggaggaaataaaatgatgtgttgagagtagacaaatgcaattgtatgcttgctgacttttgctttcttctcagcagctaagacattccaatggagctaagtttactaagattaatgctagatggaaaaagaatgcacttgtaccwcttctggccaatagttaaataaaactagctggccaaataaagcatttaaaataaaatgcagagtggcatttcaattgggttgaatgaaatttattgtgaaagtcagttgtgcagttgcatggaagagccagttttgtagaaagaaaagagccactgaatttggtgtatctaatttcattccacccagtcactctgagccctaaatgaattacaggaaatgaacttccaagcttgaagcaatgggaaaagtacctactcggtctcttgtgaaacattacaatcaagttggtttttacatggaaaaatgtaattgtttcctgtttgctaggtatatttatgagcatacctctgtacagctttgttctttgattcattgtttaatttctgttctgcatgaagtattttaatttaaagaattcattctgggcaattatagggctgcggtttcatcaagagtctttggtggccagggtgaaatatgctataattttacatttgttttcatcataaattacatttttgatacttttagggtttttttctgtcatttttattgcagcaattattactatgaccactttagttaaagttgaaaagccattttgatttaccatgtactttaagttcttcctaacttcttgacaaatctatttctggggctgaatttttcatgtttatttggagggcaaagaagaattttacagggatattggagaaaaccccttttagataataaaaatatgagttataaaaaaatcctcttttcttaggatttgctttggggcaactaaactctggtgcatgaaaactggttggcttggaattttgccataattgttgaacatcagtgaagaaattactatcttaagcagtagataattcttatttttggccatacaactacatgtctctggaccattgagccacatcttggaataaagaaatacttgatagcttttagaaataaatgctcatgaataattggatttggtggtgatgtagccatcttaacaactttgtaatcttttggcacagatatggtgcttcctttcctcttggggaatgtttccacacaggcacagtccattttctttattctcaatgaaaatcttttgttgaattggtactctggaatcagacatgggtttagtcatgatttggcttttactagctgttggactgcggacaacttattcaccctcttagagtctcagtttcctgatctgtgaagtggggataatactgtttttggcttcatgtaggtgtggagaattaaatgaagtattctgtgtcaaggacttagaagtcctggcccatgataagtgctcagtagatgtgagctgccactgctcttattaatatcatcatcatcatcatcatcatcatcatcatcatcggcggcggcagcagcagcaacagcatctttatgaatttattcattatacatttttataagtctattctttttagaagcttcaggataatayttctaaaataagcatgttgctaccaaagaagggaaaattctgcttggtccttaggaatcaaatgaaaaggtaactttcaggtaatacaggaagtgaggcctctggaagtgaaaagttattaggctgaagttttgtaggtattaggaaaactaccttcyttggttgtcatcaattactagttaatagtcttgagaaattaagagtctactgctagttagcttcttcaagaatttttaaagaaagccttggtagtayagagggaacccccccaccaattttttttttctgtcgtgtatgtttttccttcctaacagcatctttatttctttttgaggtaattaggctagtggaactgtaaccaggggccctactcaggggcctgcaccctgcctatggatgggtgtatgaccacaagcttggctaagtaaatgctccttctttggaatttgattctttagctraaggattctcccttgtcctaggtgggcattctgatctgccaacatgtactatgagaccactgttgcctccatgtctgtcttggctagtagtcatggcctccaaaccttattttccattctgccatggattggctgagactccagtatccttccaataattcttaaattagccaatttgtttcttctgcttgcaactacagaaccctcattgatagtatagtctattcattagtgagctagatctggaataaatatggtatgtttggaggtttacaattaaaatgccactcattactttctttcatcatgtgtaagtagctcagtgttttgcagtagattacaaaaagtacagagttctttattagactctcaaaaatgggttattttgctgaacttcccagtactcctgtgtttggtacagaaaagtcactcttggctgcttctcttagctctcaaagaaggtgtatgtatgtgggcgtagagctggaaatgagaagagaagcggagaagtcatccctcccaatttctggggccctggtctctttgtgtcatggggattgttaagggactgagattttcttcggtttacccccagcaaccccaaacacaacaggtatattctttagacatttgtctacttttccctgaatttttatttctcatttgaacactgttcttaccctactgagcaccttcttttcaatgatgtgtaaaatgtgattgaaaactcaattacttccagttctggcattgcttgtggaatgtagaatgagaatggaatgggcaagttttctctatttccccttgtgtcttatttgttgactacttctgtgctctgtgcagtgcctagaacaaaacttgttaatttttttttaacaggtatatcaattttgcactcctactgtgaataaatagcatgacagtattatatggaaggaagagccttagctggggtattaggaaacattccttctagttttggctctgccatttgctagctttgtgactctgtgcaagattcctaactttctttaagatctgaggttcctcacctgtaaaatgaggataacttttgccctatttattgcacagggctgttttgaggatcacatgaagacaatatatatgaaagtgcttagtaaattttaacaaatgcataacatcagtttattactatcatgccatgaatatttcttaaacagatgaaaatttgaggggcttgttttaggaggctgagtaggaaaaagagacagattaaacaacaacaacaacgacaacagcaacaaccaccttgtatagtgcttgtgctgggtattcacatttgtgcttccagctcctctctcttctaaatggctctgcaccatgggcctaacctctatcgcaggcattctctgggctcccttgtttgctggctttctgttgtattagccaggggaaggaactggatgaagacctgggaacacgaggttgaaatattcttccctactttcttccctgcagcattgtgggttggcaatggctgtatccctctaaggaaggccacagttccggttgggggcctctcttcagcggctacagctttttctactgtctggtaactgcctcttcccttttcccctttgagtctggagtgttaatggaatttttgctaagtccagcacactagaccatcccttagtggtcttcccttaaccctgccttcaccccaggtgaagatgtcatctccttcctgctgtgaccttgattgtacaaaggaactttgttctttatatatttttmcaccatcctcagcccaattcagcaaatatctttttaggatttagagtgtgccaggtaaaaagtaagtctttattgtacacttttaagaaatggacattttgattgcatagttggagatattatatcttttttttttaaaagcaagttttggtaaattgaaaagctttatagtagcctcagtgtataaagaaataccatattgtacttayatgcrttacaaattaccttttacattttatttttatttttatcaaagcagtgtatctacattgtttaaataaaacagcattaaatagcaaatatttaaaaactgcaacatctatgccttctttctacctctctctggattgcttcccagaattagcaactttctattctgatatttctggtgttyacctctctctttctaaataatgtacttatattattttttcctaatttatcaattttagcaatagctctctgatcctttccactcttaccacttctggtccccacagcctcctgacatagttatattacaatttttatttaaatcaacaggtaatatttacattatcatgattacgtaatttttttctgttgctaagccgaatggtatttgttatgttttctttaatataaaatttkttgtctttcttggaattaatatgtgcttttaaaaaaatttgcctactttaggcatctaccttataaggtaggtagtaatagcatgtcaatttcataggtgggtcatattagtatttccattttatagttgtagaaattgagacttaaggctaagtattttttccaaggtcacatagctagtaagtgttagaactgggagaagacaccagccagtctgttcacagagcctgcattcttaatcattatattacttacaaatactgtcacttcagttatcctgatggctacttraaaaaaatttctgagttctatcttcagagattcaaaatcagtggggctgaggtggagaaccaaaaatctgtattgtaaaaagctctaggggtgattccattgatcagcaggtttgagaacttctgttccatatcctatcattaccgtaattaccatcatcacaatcatgatcatcaacatcattatcatcttcatcatcatcaccaccactaccatcagcaataacatgtcttgctcagtgctctcagtaattgactagaaatcctggtgtctgttaaagcagctaccttttgacttcataggtgagatcatcacactagtgggtgattcagtaataattcatctggccatttttttttctttttttttgagaagtgctttgggagaaattatgtcccatagaagtagacaagcttattttttttcagctcagccggttgttgctttatctggtacaaaagcaatgagaactttgtccctgtacttaactctgacctttaagggacttttttttttctttcttccctgagagttccctaaatgacatctgggcaaatacaaagtcctagtgaaagagaaactttgaagtctttgttctgtttgatttccacttcccccactatcacaccccccactaaccacccccctcgccccttgcttatggcatttcttgtttatcacgtatgagagaagcaataaaatttggcctggggttttctcatccctaggtgtgaaattatttcagaactataataataatactttgcatttgtatagtgcttttatttgaagatctaaaagtgttcttttggtgttaatagagcttcccatcaccctctgaagtaggtaagtattattagaggatatttccttcaagaacattttcactttacataccatgtgtgacttgaaaatgcttttgtattatttgggaatctcaactctttaaagtgctatacatataaggcaattcttttatttatattcaatcttcattaatgcccagaacattgagggaaatgcaattcctcataaatgaatgtggcgttatttagaaagtattaggataaaagccgtttggtattgccttttattggaatgttttgaaaatatttaataatgctcattagctacagaactacctgttgtacagttagttttccttttttttaaggtagcaggatttgcaggaaggaaaatattaaataactagtggtgtcgggtcttagaacccaatcccccaaagtatggtaccttagcatcctgagtactttgaactgaaggaaatacattggaaagccctcagaaccaaggtctttgtggcagtctcccataatactgtctcctacttctcttcctccccttaagcaagtcgtataaaccagaattcctcttccctaaggtgggtcatagaaactagaatgtctcttccccacagcaagccattaaacctagaaaagtcactctcttccttctcctttgaagatcctcattccatagaggccctgctccatactgggaagaaagaacgttacacagagaggccaataagaatctgaatagtcaggccttgctgatccccaccmccacccccaccaccgccaatctattttctatttccagtagaacacaccccttttgttctaccacatttctacacagctgtgcattcttcactgaacctaagcataaaaactattttcctttagtctttgggtcttcatttcggaaggctgctatgtcacataaaactttrattaaatacatttgttatgcttttctcttgctgmcctgtcttttgttataggaatgttggctgtgactcttgtgagaggtgaggaaaggtatcacacctttccatccctacagtgggaacttggcctggtattgtggaatcctgtggttgctcatgatgtgtcaaatcaactaaaaatacaaactgagtgtgcactctgatttaaagatttcattctgaaaaattgttttgaatgctgcatgaattgcaagcatgcatacatgcataactggttactttttttttctctaaatgttgggaagttctaagtggtgtttggagtgtctgctcacttaaggtcattgatgcaaaaatgctgcaggtctgttatagcataaaacatttttaaaaaggccccctgaactttagtccactctggtcaccatgagaggcttcttgtccatgcattgttgggtagtcctgttgtatctgtgcaaagaaggctgggattttcgctgtggcttcaaggccttggtagtcattttcccagtatcccatcactatcccgatcaaaagtcctgtcacctctctagagttctgccaggaagcagggtgccagcgtccactactttaaggaactgctccagcttctctccaataccaggaaagcccaatccttactgtactccaagtgcccacctaaacagatcaaagaacaacacttttaagcaaaacaaaacaacccaaattgtctttattttggacctttctgctgggatgtaacacattcccttcaatgaatttaggcttttttgaaaaagaaaagtctttaatggagactggatttaggggattggtggttgtcttttagcatcttttgcgtttgaatatgtctgggagacaaagggaagaaggcaaagtcttgaagtttttgagatgcgaaagggaacagtatacacaggagggataacaaagagtacaaattgatattttaaaattatgctgcccctaattcaacactgagacaaggtgatgcctcaccatttgtgtggtactttatgactcccatgataagtgtcagatgatcacatgattaatcctttttctggcatctcagttgtctttttttttgtagagagaattcactgaagacccatcatctaaagattttggggaatgtgggtggaattatgaatctctgcatcattttctcctgagtctttgctcaaaggaggccacataaatttgctgctaattatgtgaagatggatttatcaccgaagatgcctttggctgcaaataatcaaaaagtcaacttgaaatggttcaaacaataggggaattaaaagaaaaaagctccctgccctctgcaagtctacctgctgccccagggatgtcatgattgatgggaaggcattatagaatcctggctccaaatgtctggaatctaactgcaatccacttttgccaagcaactggggacccaccagggtgcctttgatggttgtcactgtgtagcagggagaggattttgagcactcagctattgacagattgctaagcactgtcaattattttgtgaattgctctaccaagttacatttgaaaatccaccaaataaaaacccatcagaataagagaaatgaattatctcagggaataagacctcctgggaggggtgcagtttcaagttttgttaattcagtggctcaacattgttaccaaagtgtctatttcttgctctttttcctgtgccatcttcagtgtgttgacttagttcttagactggctgccttcatagttctaagatggctggttcctttttgggagctacaggcagacatggcaacatccactggcaaaataaaatatctgttcttatatgtccctttttaaaagcaaggaactgttcctgtaacccctgagctgacttccccttaagtctcatttagttgattgcagtcccatgctccttcctaaatcagacactggcacgcggaatggggctcatccctggtggcttagattggtgcttcccaactttgttcttgttatggtgcacatagaaaatacaatttggccggcatgttaagcaatcagaagaggctgctcacagctggagtggctgatgtgtgtgtgtagggcatgggtgtggggtctctggctgctctgggtctgcccagctgcccttggagctaaagggatatcagagcagctgttaaccctttccctgttttaaactaatcgggttttatctcttttctgggataatctcaccttcccttgagtacatagctttatggagggaggccaccctaataaaactggggcttatactagtcaggattcttcagagaaacagaaccaaaaggttatttattggtttatttacttattgtgaggtattggcttatgtgattctggaagctgagaagttccatgatgtgctgtctgcaagctggagacccaggaaagccggtggtgtaattcagtccaagtcctaaggcctgagaaccaagggagccaatggcataatcccagtctgagggccggcaaagatgagatcatgtatcccagctcacacagtgaagcagaaacagggcaaatttctccattctcctccttttcttctgttcaacaaactgggtgatggccttctgtttaaatgctaatctcacccagaaacaccctcacagacacatccagaaataatatttagtttgggcaccccatggcccagttgagttgacacagaaaattaaccagcacagggctttacctgtgaggtgaaacaggaaaatttctttttttattttattttttttttattatactttaagttttagggtacatgtacgcaatgtgcaggtttgttacatatgtatacatgtgccatgttggtgtgctgcccccattaactcgtcatttagcattaggtgtatctcctaatgctatccctcttccctccccccaccccacaacaagccccagtgggtgatgttccccttcctgtgtccatgtgttctcattgttcaattcccagctatgaatgagaacatgcggtgtttggtgttttgtccttgtgatagtttgctgagaatgatggtttccagcttcatccatgtccctacaaaggacatgaactcatcattttttatggctgcatagtattccatggtgtatatatgccacattttcttaatccagtcaatcattgttgggcatttgggtcggttccaagtctttgctattgtgaatagtgccacaataaacatacgtatgcatgtgtctttatagcagcatgatttataatccttttagtatatacccagtaatgagatggctgggtcaaatggtaattctagttctagatccctgaggaatcaccacactgacttccacaatggttgaactagtttacagtcccaccaacagtgtaacagtgttcctatttctccacatcctctctagcacctgttgtttcctgactttttaatgatcgccatgctacctggtgtgagatggtatctcattgtggttttgatttgcatgtctctgatggccagtgatgatgagcattttttcatgtgtcttttggctgcataaatgtcttcttttgagaagtgtctgttcatatccttcacccacttgttgatggggttgtttttttcttgtaaatttgtttgagttcattgtagatttggcatattagccctttgtcagatgagtagattgcaaaaattttctcccattctgtaggttgcctgttcactctgatggtagtttcttttgctgtgcagaagtgctttagtttaattagatcccatttgtcaattttgtcttttgttgccattgcttttggtgttttagacatgaagtccttgcccatgcctatgtcctgaatggtattgcctaggttttcttctagggtttttatggttttaggtctaacatttaagtctttaatccatcttgaattaacttttgtataaggtgtaaggaagggatccagtttcagctttctacatatggctagccagttttcccagcaccatttattaaatagggaatcctttccccattgcttgtttttctcaggtttgtcaaagatcagatagttgtagatatgtggcattatttctgagggctctgttctgttccattgatctatgtctctgttttggtaccagtaccatgctgttttggttactgtagccttgtagtatagtttgaagtcaggtagcgtgatgcctccagctttgttcttttggcttaggattgacttggtgatgcggggtcgtttttggttccatatgaactttaaagtagtttattccaattctgtgaagaaagtcattggtagcttgatggggatggcattgaatctacaaattaccttgggcagtatggccattttcaccatattgattcttcctacccatgggcatggaatgttcttccatttgtttgtatcctcttttatttcactgagcagtggtttgtagttctccttcaagaggtccttcccatctcttgtaagttggattcctaggtattttattctctttgaagcaattgtgaatgggagttcactcatgatttggctctctgtttgtctgttattggtgtataagaatgcttgtgatttttgcacgttgattttgtatcctgagacttagccgaagttacctatcagcttaaggagattttgggctgagacgttgggattttctagatatacattcatgtcatcggcaaacagggacagtttgacttcctcttttcctaattcaataccctttatttccttctcctgcctgatcgccctggccagaaattccaacactgtgttgaataggagtggtaagagagggcatccctgtcttgtgccagttttcaaagggaatgcttccagtttttgcccattcagtatgatattgactgtgggtttgtcatagatagctcttattattttgagataygtcccatcaatacctcattttttgagagtttttagcatgaagggttgttgaattttgtcaaaggccttttctgcatctattgagataatcatgtggtttttgtctttggttctgtttatatgctggattacatttattgatttgagtgtattgaaccagccttgtatcccagggatgaagcccacttgatcatggtggataagctttttgatgtgctgctggattcggtttgccagtattttattgaggatttttgcatcaatgttcatcaaggatattggtctaaaattctctttttttgttgtgtctctgcccagctttggtatcaggatgatgctggcctcataaaatgagttagggaggattccctctttttctattgawtggaatagtttcagaaggactggtactagctcctccttgtacctctggtagaattcagctgtgaatccctctggtcctggactttttttggttggtaagctattacttattgcctcaatttcagagcctgtttttggtctattcagagattcaacttctttctggtttagtcttgggaggttgtatgtgtccgggaatttatcaaattcttctagattttctagtttatttgcatagaggtgtttatagtattctctgatggtagtttgtatttccgtgggatcggtggtgatatcccctttatcattttttactgcatctatttgattcttctctcttttcttctttattagtcttgctagcggtctatcaattttgttgatcttttcaaaaaaccagctcctggattcattaatttttcgaagggttttttgtgtctctatttccttcagttctgctctggtcttagttattgcttgccttctgctagcttttgaatgtgtttgctcttgcttctctagttctttaatttgtgatgttagggtgtcaattttagatcttttctgctttgtcttatgggcatttagtgctgtaaatttccctctccacactgctttgaatgtgtcccagagattctggtatgttgtgtctttgttctcattggtttcaaagaacatctttatttctaccttcatttcgtgatgtactcagtagtcactcaggagcaggttgttcagtttccatgtaattgagcggttttgagtgagtttcttaatcctcagttctagtttgattgcactgtggtctgagagacagtttcttctaatttctgttcttttacatttgctgaggagagctttacttccaactatgtggtcaattttggaataggtgtggtgtggttctgaaaagaatgtatattctgttgatttgggatggagagttctgtagatgtctattaggtccgcttgctgcagagctgagttcaattcctggatatccttgttaactttctgtctcgttgatctgtgtgatgttgacagtgggtttttaaagtctcccattattattgtgtgggagtctaaatctctttataggtctctaagggcttgctttatgaatctgggtgctcctgtattgggtgcatatatatttaggatagttagctcttcttgttgaattcatccctttaccatggtgtaatggccttctttgtcaaagagggaaatttctgtgtgacaggccctcagcagtgtctgctgtgtctatgttcttgtctttgcatatgtacctaatctcctttttgaatcattagttccttagttccttatcaagaaaggactaagccttgcagatttcaagtgctcaatcattatttgtatattgagtgaatgaatatgcactcacctacatgactgactgatgcattcaatactattgatcttctgtaatatgctaggaatgtgctgtgtgaggtacaaggaacatgggtcgggcagattattttatgccctagggaaggagacagatcagaactagtaaaccaacaaagcatatacaattaaaagttatgtaaatcttatttaggaaacatcaagaggcaaaacatagcaggcctcctcatttggagcggtcagagttaatgacgtttaagttaagatctgaaaagaaggacaggaggagggattcagcttgtaaggagtgggtgaagagagttcagagttctgaatcttgcaactatgtcttagagataatttgttttcaagaaccaatacaaaagaaacagtgacaaaaacgatgaaaggtgaggcttctacaaggccacaggatagcttactcatttgacaaaagkttagatggtgagcttcctgaagccttaggccaggaagtggttgaccstcaaaaactaaccagagtgggatgggtaaatggacaaacatatctctcagcatcccatcctaaagagcaggagactgtctcaggatcctcatagcctctcacctcttctgtctgcagactggcttctttgcatatccagccagctatggctacccgtgcaactccctgtgcctcattcaaggggatgatagagactaactgtattcctccttcctgggggaaagaatctgaatggtttgatgtaggtcaggcgcccacccttgccagagtcacctgtggcccagggcacaaggtctacctggttagctgccgkcttaattctacttaatcttgcttggcaggactgggagagactctctgggtaagtggagtacagggcaggcagctggattaatgcccctgttattaataaatgctgcttttcaagttcttcaactttaataacactggaagagtcccagtgatgtaaataacttagttaccacctggtttatttttgagtacttataccygctacagggcattgtgtacagcagatgcttaagaagtagtgatggtgataataacaaaattgaatgtgaaatatgatgtagttctttcctaatggtgcaggttaattatattgttttaatgaaaatgcttctttgttttgtggataaaaatcttttttgtaaggttcagtctatgtctttatttttttctttaactcctgcattttgagaatcacagtctatatatttaaatcactttagaattactttattactattataaaagtaatgcatttgcattttagaatatttggaaaccagttcagctaagagaagaaaatagaaattgtgtataatcctacagcccagagatgactccaagtgacatttctgggtgtttttttcccagttagttctttatgtgggcatgtattttaagaaaatggcacatactgctttttccattcaacattatattgtgaacattaagaattatcctactgcatcctcatctcctgctgcagtgtgttctctcatgtggatagaaagtaccgaagtggatgtacagatttgaaaagcacctctgctgctgaatgggatccttaggctgggatggattggaatgctgaccctgaggtttgtgtagcagtatagatactgcctgactgacttcaggaagagcagtgtgattgtggaatttggtcagaaattaagttcgtatgatgatgatcacttgtgtctgcttggccactgctttcctgaggataatctgaatgaagctcattgactattttgcaaggaggttggctcagcttgagcatccctgtaaggaaaataatcagtgtctccctcagggttctgggaagcttctttgctgctcaggtcgaggtggcctctgcagtctgtgcttgcttctcctgataaagcaaattgcaagcatgccaaattgctttgctccggcttaaccctactccagaatgaatccataaatgctacaaaaggaaagcttatgaacatatgctacacagaacttagaaaatgtcctgcctacttaatccttttcctacttcgtgggggggaaaaagtctatttatacttgaactgagaattgagggatcacaaaagtgaagattggatgccgtgctagaaatcaccagttgtgttttctcatttcccttagagccacagattgatttttcaatacaactgtgtcagtagggaaatgtgccgttctttctagagttcttagattcactcctaagtatgtgaatgtgtctaactgccttttgagaaaatgtgagatcccttgtttaaacacagcgtgttcattagagtggattctgaggtctagaggccacctcttgaagtcactgcctctcaccttctctcatgactctacatttagatgcttgtagatggagaagggcacttctctgcttgtgtgttcttggacagattattccatggagagatgtgtggaatcacaatagatgtgagctagctcagagggttgggaacttgccctggcacttagaatgcatgctggcccttctggttcaagatgattcccctgcaaaatagttggtctttttccttgctggcatatttgttcacagacatccgcagaagctgttctggaaaactttctgaccctgaagcacctcaaaaattttgatcccgtgctccttgctgtgagtcatcccacactggagctctggaggactctctagcaggtcagctttggttggcttcagcctccccatctcaaggaagtcagtgcagttttcctgcctgtgtcttatttaatatatgtctgtatcytctggctgtcttggaatgggggtctaaggggccattcagtttgacaccagaggcactgtctgtgtatagccagtcataatgaataactgtaaacatgagtagatgcctgcccaaaggggatgttagccgagaggtgtgtgaatctgcttggaggggcaacagctgaaatgtcagagtagtttactatctcctgggtagagacactgggggaatattctctgtctgaaaaatattataggcatcaggtcccagatttctcttcctgtggctgcacgtgctcatctttctgatttagaaactagcgaagctccgtcagtattacaagtataggagattcagactgagaaagaagtaaaaaatggagggcgcttcaaaatggaaatgaattgtggtcatcaccaacccaggatacatttgagaaggagcatttatgaacaacagttgcccatgatgctttgcccattaatgccaccgagacctgctaacctgctccattttctttgtaaacgtgaaaaaccctgatgctggcaaacagggaagtcatgaggacagcagaatgaaagcatgtggtgtgacattgtggaccattattccattgatatttatcatggcattgtgatctggtccaaaaatgtagctggctttttggcttttgatatactacagtcacttttcttgaaatctctcatttaatctttatcacaattcatggggcagatattgttcttcaatatttaacaagtaagggaacagatgttcagagaggttaggtaagttgaccaagattgcacagtttgtaacaaggaggcattttaagagagagagtgcagcaaatcttttgatcaggcaaggggagaagaacctgtcatttctctgaaaaggcagcaggatgctaatgaatttgtgctgtgttccctgataactttagatgaggttgggataatttggggatataccttaggtaagcaggtgcttctttctgcaaagctgatctgttttcattcattcattcacttgtggttgattcattcagagtcacttactcgctttttctataaattgggcacttgttttgctgagagctaggtattaagagcaatagaaagatgatgagagaattgagaatctgattggagagaaggatacccagagagagctagaacataacggcactctgtggcaagtatggcaagaagcaacagaattcaggagcatgttccaggagtccttggagtgacctctactactgtgtctccccacattgggaatcccagttagtattccagaaatctgtatctcagcacagggactggcatttgttttgcactgtcagccacaatgaagagacctattaacagcatgtgatttctttgtgatggataatttgtgagctcagatgtggatgtctaaaagagatggtgcatagaagtagaagggccttcaaatcaaacagtacagaggacttcctctatgacacattcagggacagccccagatataaataatcatgaagtgggctactgtctgctcttttgtacccttacttctcatagcttgtgacatccaaccccaccccccataccccctatcctgaatacatgctccttcaggttctcagggccctgcctacctcttttggtggtccctcaacctttaatctcattaataggacaggatggaggggtgttgagaattctatcattcatttactctctagtatgaatttaaaccagtttgttacagtattccatgtggtacatgagatgagatgaatgaatacatttttggtkagtcacatgaaatcttttcagtttccttctatttatggcaagtgatattggctatatacaatatgtataccagtgacattggatatttacagtggggatataaaattgtcttcttcaaaaaggtaatttagactggcagaattgagttgatttaaagagaaatgttgtattaatatagaacactggctcatagatattatacaaatcatgaaaggagtatgtaaataactgaacttttggaacagttgtgtcattttatctggttatgtaggcatttcatactttaaccgtggaatacaatgttttctatcctaataagagaatttaattgatcaaggtggggagagcatttctgaaatcctcttcagagatggccacctgcccatcaggactgtgattcacccatgttacccatgactcataccacaccaagctttctctttcagttaatggttacacttcagagaaagttatttccccttcagagtatccgatttcacatgactatggagcatgtagccccaggatcctttctcattaaatgcttatgttggcatggactaattctggttagagtatttaaaccagacttggtatgtccagtagccagaaagaatagtaacagtcatctaaccatacacttatagaacagaaatgtaatagaataaatagaatatttatttcatgtatgaaaaataatactagaatctattcctgaaccattttttctaagggataggaaaaattgtcaaaacaaagagagatttttctccaagaatagtaattaggctaggaaagagacatgttactgcaattataagtgggccctatgtggcaagattcaggggcttgctagcattagacgacttggactacatggtagatttttttggtctttgggtctgtctttaggcagagccaggagagggaacccagggaatatcagagcagcctgtgatgctggaattaaatgaaacttgttagtattctggacatgacaggccaggtgacatcctgggctctcttcagccctgtgattctggatgactgtttttttccccaccagttccataatatatttgtttgtgtgcttccttcaagtaccagaaggaacacccattcttagaggtctgttgtattgtcttttcctaaatacagtggagggatattactacacaaagttaatttttcatccttcttgtagatacaaatattgatgttttcacagtatatatttgtatatttatttgctatagcctcttgattgttgataatcaagagacaggaaaaatataatgttactattattgccattattggtcattacttggctgggattttatccagtttgggagctaaattcttctttccgttgacaaagaacaattaattgmcttcagataatttaggcttctcatgtccccaatatgtgatttgtcaagctaagaatattactttaacttcattatgtttactttccttgtatttggtatgagtgagggaaaataatccaaacatttgaattccttgtctttattttttagtygaaaaagcaacggagataaatgtacttgaaatgcatatatttaataaaaatattaaattgataatttaaaggaactcaggcctaaaatgattactatcattaactatgccccactccacataaagattgactggtaaagcaaatcattaagcagttcccatgctctttctataatttggctaggtgctgggcatatacatatatatctgttaacatcattgataaggtccctcccccatagttcttgtctagctttaaataaaagcagggcaattaaatcaattaatactttgcttggtacttttttgtgactgaatcaacttattttttgaggtagcatcagttttattcagacagctgcacaaacataacctcggtatttagtcttggaagacatgcaaaatacatttcaagtctgtgcttcctaaacacaaaactggagaagagagactgagttggaacccccatggtcttcacatttctcattcatggaaactgaaaacaaaactaggtctaacctaactattattgaatttatcgttgagagggaagaaaggaaaatctgcttagcatattatcttctgacttcctgtaaagtgaaataaacctaatcagtactggtgtttctaaaaacatatcaattgtttacattttaaacgcaattgttaatgagctgttattatgaaagttcaccacattgctctaaatcacttgctgagccagccatcagaggcttacatcccagcaaacattttctggaatttgcagggcacaattatgattgactacagatctcctcacactttcattacaagaattaatgtagtgaattgctatataaattgatgccgtgagggaaaggcacgctaagaggttttaacaagactgtcagtagctcaatagtttgtaaagtcaaacttctcagtgttttcagagtgcccaccctctttctcagtgtatcttttcttcttggtctagttagcaaactgaaagggagagaatggttgttttatgtcaattttctgtagaagcataacatgctataggatttgtatacttgtaaatccaagttgtacatcttgatgaattttcccaaagtcatcatgcctaaggaaccagcatctagaataagaggtagaacatgacactctgatgccatcttccactcactaccatgcttgcttccactgaggctgtcactatcttgactcatctgcgattggttttaccatgtttttgaatttgtgtgtgtttttgggtggttttttttttttttttttttttttttgagatagggtcttgctctgtcacccagactggagtgcagtggcacaattatagctcacagcagccttgacttcctgggctcaggtgatcctcccgtcttagcctcccaagtagctagggccacaggtatgcaccaccacacctggttaatttagttttttataagagacagagtctcattattgttgcccaggctggtcttgaacccctgccctcgagcaatcctctcaccttagccaccaaagtgttgggattacagatgtgggtcactgtgcctggactaattttatataataaatagaatcatacggtatgggcttctttgtgtgtggcatattttgctcaacattgtttgtgaaattcggaatgatctttttgtgtttaagaaataatgtaggcttggctgggcatggtggctcatgcctgtaatcccagcacttcgggaggccgaggtgggcagataacgaggttaggggatcaagaccattctggccaacatggtgaaaccccgtctctactaaaaatacaaaaattagccaggcatggtggcacatgtgtgtagtcccagctacttgggaggctgagacaggagaattgcttgaacaaggaggcagaggctgcagtgagccaagatcgcactgctgcattccatcctgggcaacagagtgagactctgtctcaaaaaaaaaaaaaaaaaaaagaaaaagaaaaagaaataatgtaggcttgtggatgtcaaacaaaatcacgtggtggacaaatactttggaaactttatagtgccttgcaaatctagccatggcatggctgactgagtaatctggggtgttttcatgttggggaaaaaattggtgtcattgaattattactgactgtcagccacaccatttgtttgtgcaaatttgacagtgatttataccagataactcatttatatcctaatagataaaatggtaagattttcagatactagggttccaaaggtcatcttagaaatgtactccctgaggtttattcttgtacaggttagtggacaattttttataattgactaattaaatggaggctagagtatatttgaacctaaggctatatcttaaggtttctacctttttctatttaattgcattaactgtgtgaattaacctataattacaacgtttttttcttcagtgtcacactatacataaaatttggcttacaggccagactacatactagattactatattctggaaggccacatacgtaatggttttcttgaaaataacacctcttatccccaatgcccaccacctcaccctgtcaaatccaaactaaccaccttctcagcaacacattgcagaggttaagagcatgaggtggcctctgttgggtgtgcaagtggattctttagccttgataagcctcccttccacctctgaaaatgagggtgagagtagcacctctcatcaaggttgttgggagtccagtaatggtttcattcaacagaatgaaacccagtgcctggcacaatctaaacactcaataactgccggttactattgttattatcattccattttataattacccctcttaacacatagggatttcgtgattaacgttaagcaggtggtcctaagaagaattctttcttaaactttaaatcaaaacaaaacttcctttgccatccttcaagtggcacagactcatttaaacaccatccagaccaatgggatgcatcactgatagatttttaatttttatttttacagaaggaaaaaaaacccagaaagtggtggtattttaatgctggagcaaacctggtatcattttttaatgtctatctgatgacaatctggttattaggttgtcagaattttttgacaaaatgtagtgttggactacctaattacattgcttcagagtccagtggggctgctgatctgttttctaataatttttggccggggttgttttgttaaaggcaaacgtatcagtcatgtgagataggtttgctttttatgtttactagtctaaacatgaaaaatccatttaggcctgctattgtggagagcagtaataatacaccattcttctcagaacccagatgtcccattcatctgaaagttttaagtcactggggagaaatgtcagagagccaaaagttctgcaggttctattttattttatattttggtattggaaaatacataatgaaatcagcattcttaaaaatatacatttaaagtaactttttactaccctctccccaacctttattttttatttttaaagatcaggagtttttttatagattgaaaacttgcgcagtggagagtataaactaagaagtatttttacatgccttcccttgtatcaggcagactcaggtttagtggagttggaagctcatacaatttgggaggtcctctttaagaaaaagaggaaaagattatgaatacaaaattagatgcaaaggtgagtatttatttcaaaatgattcagtgaaatgatttggttctctttctttttcttttttttttttttgagatggagtcttactctgtcgcccaggctgaagtgcaggggtgcaatctcggctcactgcaagctccgcctcccaggttcacaccattctcctgcctcagcctcccaagtagctgggactacaggcgcccgccgccatgcctggctaatttattttgtatttttagtagagacggggtttcaccgtgttagccaggatggtctcgatctccttacctcgtgatctgcccgcctcggcctcccaaagttctggggttacaggcgtgagccaccacgcccggccggttccctttctttcaagatctctttgccacaaatgcttacagagaaatgcctcttcatgtttcctctcagctagaacacggactcccaaggactcttggcactctgagggcccatgcaacagggaccctgaagtttaagcttcatcagcatcatgtcagttcttctctgtctctttgaatatgctgctgaatcagtgagaatataactggttagatggcatctggaaagctggagaagacgtttagttggaattagctgtgaaattgagtttcaggttaacctcgaggtggatattgcaaattcttaagtgaattgggagaataaaaaaagctttataaagtataaagctttaaaaatggttatcaaaaagtagaataattccaggatacataacttctctgcataagttgttgcagtgaaagattcattagaaaaatgtaacaataaaaagaagaggtattgatgttttccagaaagctgtatttcttgaggtgtttaattttttgtrtgtctcacacagcaagtttcctggtggcagaacaacatctagccttgacatgtggtgtaaatctttatgctctcttcagaataaaatgattgcagcacttttctactatcagtggggcatgaattgctgatatgttatttgatggatccaagcatatcagttgtctttgtcaccaagagcctcaatggctcaaactctggagatagttattcaaggaagagtttcagtacttggccatgggatgccccacaacccagagaaacctgaaacccacgtcagcctttcgattctgtatgttcatcagttatctrtttacttattgccactttgttgaatgctctgagatactgatgtttgtcaattacgatttgcttatgcaaagatgagaaaagatcttggctactgctttatctgtctacttccaaggcatgtcaaaagcccactagttttggaacttagattagttatccattgtcttaagctgtttgtgctgctgtagcaaaatatcacagacttggtcatttgtaaaccacagaaatttgtcacagttctggaggctgaraagtccaagatcaatgcaccagtaggactggtgtctgttgagggctgctctctaattccaagatggtgctttgttgctgcatcctctggagggaagtacaccatgtcctcacatggcaggagggacacatgggcaagagagtactccttttgacctcaagcccttttataagggtgctaatcccagtcatgagagcctcgccctcatgacttaatcgctacccaagggccacatctcccaatactgttgcactggggcttaagtttcaacaatttaattaattattaattaattaaatttaagtttggaagggacaccatcattcaaaccatagcacctatgttgtaaggtcaagctgagttgatagtatatgtcatgtgttcactatttaatgaagactttcctagagctcagtctggtgactttgatgggggasgtggtcaagctggcatctgggtggaagatggatgttgaaagtggcagaaatggacaaagggattttaggagagtttgtggtggctcgggagtatattttacctatctggtatttcttcaggagagaatacaggtttaaattacttgaactactgttaattatttttggttgcttatttttgttgttttttgttattgttttttaaatgtgtgctttgtgtgacaaactgtgaggtatttatatgcatttctgcttttttttcccttctgccacaataagagcatgtaaaccttacctttgtcatgttctttattcttttcttaacctttcgtgagggtttcgcagacgtcctgttaggatccaggtcttctcttcatttaatagatgaggaaatgcaaacataggaagatgtgctttgtggtttcctcgagatcattgcatgccattcaccatgactggaacccagctgactgactcccatctctaaagttctagaaaggctgatgaataggacagtttggataatggtaccctcacaagtatcccattgcaagtatgtattgtatagaattgcatggtgacatcttaattgcccatttaatttatgtagctacaacattttcaaggcatttgaaatatcagaatagcctgagaaatgtgtacaaataatctgctgaaattaataagtggaaaagatttaaagatatactagtgtcttaacaacaattgaagacacagattggcctggctatagcatgtgaaaaatacctttcttacagaaaatacatgctgaatcaagcattttcatttggaagttaatcaacagttgggccataaagatggaatcatgaggtcccccccgcccagagtaaactctgaatagatcaaatttgccaacgcagatgaaccatacagattttgaaatcctttcctgatgctttatatttaatgacatgcctatttatttagaaatttaaaatgattatgcttactcacataaattatatctgtaattaaatgtctctttcctcagcattgcagtataattgttttatcatggtggttcttggttttgagactctgtaagaattgtcagttgttgcatttactttagaccataagcaatggatgcagattttatatgtagtgcaagatcttgagtttcctaatcagtttttatgttacttaagcagaatagaaagcatagccatatgtaaaaactgagtccatgtactatagggggaagatgtatgttggtacctttctaacacctgcagtttccattatccctcttctgcagccaggctttagtagtgggatcctcccacactccccttaatatgagtatcatggggtccttacataagttcccaattactgcaggtcaagattcaatcaaaagagttcttttttcaattgcagttcacttaaataaagtaatctcacattcaaagtccagagtactgcagagggcatagagtgataacaaacaggatgacaagttagaagggacatgctggctgggatgactcagtaggtactgggctttaagcaaagagtagtgaagattkgatattcagactgctgttaagatgtgtgtataaagctacttctccttaatctggctgggtgcccaaacctcctgctagaagagtcacttttaagtgttaaatttatccctcaattttcttttttataacctaacagtctctttaggttctcacaaagtagagtggtaggaaatttgtatttttttctatgaaactttcttccgctgaaagcttgttggaaaatgagaactatgttttgcaaataacccccagagttttgatggactgtatatgtatattctgtgaaatacagtgaaatgctatccttcagagatacctcacagttcataccaccaaagacatcgaaagcattctaacaataataaataccacaggtctttagaaacaacacacacacatacaatgaggttatttttagttcttaggcaagcacagtgactgtcaaataaattatacagcacattttggagtgatagattagtaaattgtcgaatctccaaaatatagctgtttgagttttttaaaaagagattttttttttcttttcagcagctccaatgagaaaataacaaaaagagaaatgttcatggttccacacacgaaagatgacaggatggattatgaacttctaggttacatctagctgcacatgtattttatttggtctgtaaactgtttttaaaaaattaaaatattaacatttttaaatcaaggtatttaaaataaatttagcagcttctgacatccctgggaagacatggcaacatctggccctgtctcctccatggtagtatttccttggagcagaatagttgctgmcctgtttcattgcaggtggaggggtaaaggctcactttgttttggctaggcctgctttactcgtttaggatacctgcctgcccctgctggccattctgacccctgactaaggaaaaccacaatagccttctgcaaatgtgttcacagctgagacaggaagaggcttagtttgtgttgcagagagaactggcatcagtgggggctctcaggggttgtgtgggggcagtgaggagcattctaggcacrtggatttaagctccagtgtcagtgaattttagacacaacttctcagatctgtaactcacagaaagtgtttggacatagtcacataaccatctatgagggaaaatgaagaagggattcctttattatcttagtaactgtattttatctactttttaggaattcttcaatgcttagattaaaatattgttttaattggataatactatcacataattcaaaagaygttaaaagatgcacagtgggatgtcagtctccttccatttctgtccctcgtgcctcagctcccctctgggcagtaaccattgtgtgtctttcttgtgtgtcattccagagatgttctatgcatatgcacacttatgtccttttccttacatgaataataagtcattatatatgctgtgctgcccttgcatttttccccttgcatattttaagctaagtttacattagagatcactgcatcttggtacatgaaaaatgaccttgttatttttaatgtctttatatatgctcttgcatagttgtgtcatggtttatttaaccattactgtattgagtacatatactatatatataattgagattgttttctgtcttccagtgataaaattctatgtattcacaattttcttctttctgcaccctctcstttttccccatgactttgattttgctcacaaaacaaaatgattgacatgaaactttaggtccacccctaggcaaaaaatgcagcaactttggtcacaacaaaatttcttttcccccstccatctctatcagcaaaaccactacgtttagtttcataaaaaagagatgaataarggaatatgctaaaaattctggcagtagttatgttttcacacacttctggatccatggttttcaaactttcatgtacataagaattttctggggatcttggtacaatgtagattcagcaggtggggcctgagggtctgcatttataacaagtgccakgtgatgcccagattgctgggttgggccaccacactttgagtaaaaagacttgtggaaatttgttgccatttcattttaatgtagtgagtggtgatgtttagatttcacaaatacccataatcatcctgtttcacaggctgggagtagtgaggttggtggccaatagtggtgtcttttgcttatatgaaagttgaataaatagtctatgtttagtttctgtttyagtgtattttataaaatccttgatttaggtgtgtgatacactttagttggtatattttcaaattaatattttagtctatamattaagattatagagataatgaaagagcttctgcataacaaaaggaactatcagcagactaaacagacaacctatagaatggaagaacatttttgcgaactatgcatttgacagaagtctaatatccagcatctataaggaacttaacaaatttacaaggaaaaaatgaaccccataaaaaagtgggcaaaggacttgatagacacttttcaaaagaagacatacatgcggccaamaatcgtgtgcaaaaaagctcaacatcactgatcattagagaaatgcaaatcaacaccgcaatgagataccatctcacaccagtcagaatggctactattaacaagctaaaaaagtaacagacgctagtgaggttgtggagaaaaaagaatgtttatacacctttggtgggagtgtaaattagttcaaccattatggaagatagtgtagtgattcctcaaagacctaaagacagaaatatcatttggtccagtaatctgataatcccattggtattttttgggtatataataccaatgggatttttttgggtatctaataccagtgggattatggaaaaatcttggctatatacctgaaggagtataaatcattgtgttataaacacacatgcatgcatatgttcattgcaacactattcacaatagcaaagatatggaatcaacctaaatgcctatcaatgatagactgggtaaagaaaaggtggtacatatacaccattaaatactatgcagccaaaaaaagaacaagatcatgtcctttgcaggaacacggatggagatggaggccattatccttagcaaactaacacatgaacagaaaaccaaatgctgcatattctcatttataagtgggagcaaaatgatgagaacacatggacacatagaggggaacaacacacactagggcctattggagggtgggagagaggagggagaggatcaggaaaaataactaatgggtactaggtttaacatgtgggtaatgaaataatctgtacaacaaaccctcatgacacatgtttacctctgtaacaagcctgcatatgtacccctgaagttaaaataaaggttaaaataaagattacagagatagaaataactttaacttctcattttatttgttttctttaaagagattatttacatatagattcatrtgggaataaaatttaattgcaaagtaaaaccaaggtaatttgaccaggttgtggtgacttaattatctcttttcastggattgtaaattccttgaggacaagatttattgaattgaattgtccttttataaatttgctattacctatgatgaagattttctccttgcccaaactttaattatactcctctgagcccttttctcaactagcgaccttggccccagacctcattcctgtatttgatctttctagcctggctttagcaataatctttttaagtgatagctggtcaccgtgatgtctaatcaagtttctcaccccacccttgatgtctaagtcattggcctgcctttagcaagaatcctgttaggaattaatttagcaagaattcccttactcctcttagtagttttctacccactgaaccccttatctgctctaacactggctataaatccctgactatctatctttgttgtatttggagttgaacctgatctctctcccctgttgcaatactgctattgcaatagtccttaataaagtcttccttaccattttaacacatgtcagaataatttttgtttaacatttgtttcttgcccctctgcacaatttttgtcttgtatcattttaaaagcaataaaagggaacaaagaagttcacttctcatcacatttcatttttctatatgatttaaactaacttaatattacttccaactaaattcatattaaaggtgaaatcactcaaaatttaaagtttttaaagatagattttgaaataaatctgaattcttactaatcttttgggtcattaaaatataattttcagtaaaaggtaaagttatgactcatataggtataaaaatgaacacatgctaaagattttattttacttatatgatttgagagaaccaggcagatgttataactggctcaaaggaaaagtcaaaatggcacaaatttatatggactaaaagagwgttaagatgagttgcaaattgagataaaactgttttctccacartaggaagtcaattaaaatcacagcctgtaagacagaatttatatatatctatcagttatctacaacttacgmagtggtgcaaaatagctcaaagacattgtacaaggctagagtcagacagctggaaagagtgtgtttatagatgatgtgtaggttttcgttgaaatgtaataatttttttccttcaaggtggaggccatctttgacttaggtgtacgccctaagtattgacttagaatttaactttgaaaagtacaaaataacccactaattggggatgaccacacacaagtaaatggcaaagacatagagatcaakatgtgtgctacaaaacatgggaaaaactagggacattttataacacatagcttctggctttcaaccttgtagcctgaagactgaaaagaaaaagaaatacctttccctgtactggcaaatttgagcttcatggtgtgagttaactatccgcccagatcaggttgtttgtaagaattcattttcataattgagcgtatgcacttgaaccagaaaatatttagagaagacaatatagtgggaaatcaacaaaaacagcttgaaaccgtgccttgaactaaattcgcattcttcagaaaccaagttgarccagtgaatgcaggagtggagacattgtgtggcctccattctgagagtgctggtgggaacrcagcattgctcaagttaagacgtgwtaaatccctgtcacaaggttgacttgggtcttcctcactgggacacagggccagaaaaatgaaaccttcaggtgaaattgagaaagttgtgcctcaggcaactgccattaggttaaattctttcaggtgcattttatagccattttttgcatacttttgtcactcatttttgaagtcacatttctgagagtgtttgttacttttatttctatggatccttttctctacctcaggggttagcaaacttcttttgtaaagggccagacagtaagtattttaggccttgggaccctactgattctttcacaactgctcaacaccatcttgcaatttgaaagcagcyctagacagtaggtaaatgtggctgtgtaccaatggcattttatttattggtwtggaaatctgagttttataaaactttcatgtgtcatgaaacataattcttttgaattttttcagtgcttttaaaatgtaaaaatcattcttaatttgtggtggtatcaagaggctgctgtccaagtctggccctgtgggctgtggtgtgccaattcttgctttatagaatggatgggatatagttactggatatagatcagatttttatgttgtggttttgtcacttaccagctgagagatcttggacaaataakctcacctcactgaaattgggtttcctttgttgtaaaatgtggatgatccctaaatacagagttgttttatggactaaataaattatgccaaaaccctgtgcttgggcctccaaaaacattgaataactgttttytttctccctgttcctttccacctcttggtaccttcttttcttttttcttttcttttcctttcctttcctgtcctgtcctttcttttccttttyttttattctcttttctcttttcttttctttcttttttttttttttttttgagacacagtttcactctgctgcccaggctggagtgcagtggtgcagtctcagctcactgcaacctctgcctcccaggttcaagtgattctcctgcctcagccttccaagtatctgggactacaggcacatgcccgactaatttttgtatttttagtagagatggagttttgccatgttggccaggctggtctcgaactcctgacctcaattgatctgcccgcctcagcctccctaagtgttgggattacaggcatgagccacagcacccagccccgtatttcttttaacgtctgtatatgcaagtttttggcagtagctgtttcattttgttattaattgaatttttataaatggcatccaacttttatatttatattaaatatagtatatatttaatagggatataaatataaaatgtatttgtattaggaaagtgctcaagaaaaatcctgtatcgaattctcatgttaaagtagataatccgtttctaaatcacccattctgtcaactcatatttccacttaccggattttcacattagattttctgtgtcaagatatgcttgtttgtgtttttatctgaagagtgagaagtggaccttggaccaccctgtctggagtcattccctgggcttctccagcccctgaagaaaatgtgagtgactacttcatcattttacctgttgaggctttgcaatggcacttactctaacctgtggctattttcttttatttgttgatttttttattgccagactccctcacacttccaggatggraagcaccacacctgtcttacttaagacaccacacctgtgtgcccattgcctcacatagtgcctagcaatgagtaggtgctttatgaacactcagtgctagaatgaatggacaacatttatgaaagtgactgtattttggaagcaggaaagacgatctgcagttttctgtgttacaagtggatatttggaaagttggtttttagaaagattggtgttgaacagatttgagttaatmttgaactgtgtgtattaaaaatcaaacaaacatacagcagaagggaccaattattgctaataaggaaggtgttaaaaaaatacagcctgcttctgtaaatgtgaggtttgtaagtagagacaataagaaccacattccaggatccaagaagaactctaaaggatgtcaggtctattttactctacagtgtgtctggtgagtgtttgtttccttggcaaggtggtataatgaaaacagaagtatagacgaggagtagagaagaaagcactaggtttggaatcaaaatacctggattcaagtctggctcttcagatgactgtgaggactggcaatgtgactttgggcaagtccactaacttctctgaattaaataactactctcaggttgtttgtgaagatcagatagcatgtgtgctaagtgcttgtgtaacctcttaaattctgtacctatctaagttagtatattttagtataaatgactgacaaaaaacggtggcatcagctasaagacagtaatggtgcacaaatttggattcctcctgcccaattcctaagagccctatgcacgctttgctgatgtatgaggcaaaaggacaacagtttcttccaaccctgggttccaggccttaagaatctagacaaggtgatggtaatggtgatgatggtgctgctgctgctgctactgacatgaatgataaattcaatagcagctattatttcattagtatccattctttgtcaaccaattttctctctcttcttctttctttctctttttttttcagagtctcactcttgtcacccaggctggagtgcaatggctcgatctcagctcactgcaacctctgactcctgggttcaagatattctcctgcctcagtctcccgagtagctggtattacaggcatgcgccaccacacctggctaatttttgtatttttagtagagacagagattcaccatgttggccaggctggtcttgaactgctgaccttgggtgatctgtccacctcagcctcccaaagtgctgggattacaggtatgagccactgtgcccagcctgtcagtcaattttctaggcaatttatagacattactcaaaattttttgaacaggcaaaaaacaagtaactctattaaaagatgggcaaaagatatgaacagacacttcccaaaagaagacatacaagtggccaacaaacatatgagaaaatgctcatcatcactaatcatcagagaaatgcaaatcaaaaccacagtgagataccatctcacactgtcagaatggctattattaaaaagtctaaaaacaacacatgttggtgaggctgtggggaaaaaggatgcttataaactgttgtcgagaatgtaaattaggtcagccactgtggaaagcagtttggagatttctcaaagaacttaaaacaggactactattcaacctagcaatcacattactgaggatatatgcaaaagaaaacaaatcattttatcaaaaagacacatgcatgtatatgttcatgcagcactattcacaatagcaaagacatggaatcaacctaggtgcctatgaatggtggattggatatagaaaatgtggtacatatataccatggaatacaatacagtcataaaaaaagaacaaaagcatgtcctttgtggcaacatggatgcaactggaggccattatcctaagtgcattaatgcaggaacagaaaaccaaatgttcttacttgtaagtgggagctaaatgttgggtactcatagacataaagatggcaacaattgatactggggactactggargagtgagtgagggagggaagcaagggttgaaaagctaactgttgagtactattctcagtacctggatgacaggatcatttgtactccaaacctcagcatcatacaatatactcaggtaacaaacttgcctatataccccctgaatctaaaataaaagttgaaacaaaaaaaaaaattcttaccacatttctgtgggatagtttttgttgttattatccccatttttcctcataagtaaactcaggcttagagarcttaaataacttgctcagtgtttcacagctatttacagtggagtctggtgattccatctttgttgagrcccatctttgttctrtgccaatgagtctctaacaagcatcagtttcacctgaagcgattgttgatacctagatggctggtccctcttccagagtttctgatttcatcagtaggtctgagatgaggcctgagagtttccaagaggtactgctggtctgggaaccacactttgagaagccttcttctataccatgctttttgtgctttgcctttgttcaggttcaaaatacccagaaatcctaggttcttttggattttaggactctttggagaagatgagaggactttcagagactttatatttttatctaggtcttttctagaatctggaataccattggaccttgtagtaggtgatcgatctccatggtttttcaaatcagtaacacttacatcaaaatgcagtctctccttttccttctcctttggtcagctttggtctagatctgtttttctgatttataataggaatattcatagcccaatttgttcactgatccatggatctactstgttgctgatgtacgcaactgcaagggagaagaaaatatttttcttttccattgccaggttaatggctgaggcccctataacaaaagaaagattaataagagaaagggacataaatttatttagtataagttttatgtgacatggagaaaggaagactcaaagaaacagggaaacttgtatatttttatgctaaatttgatgaagagcagacagttgtgtagaagtatgattggacatagggggtgtgatctaaagataataaactggggggaacttagcaagccttctttattcagatttttctctttatctctgtgccttcagagataatgacattcctttcctccaggcataggaagggtgcctcttgaataaggcctatgacccactttagaggaaggctagagatttcttttatggcctgcttcaggggaaaagtgtgggagaaggtcagagagactttcctgcttccactgttttgtcaaatgccgacatgccatattttggggtagtgtgtcaagaaccccatcacaacaaatattgtttcagccttctgtgtgccagacacctaactgggtgcaatggtatgtaaaamcggatatggtccctaccatcagcgagcattattctagtgaggaaaagagacattagtcagaaaatccagayagataaatgtcaatggtgttaagtgcaagaactataacagggagatctaaacttcttggcagagaggaggggtagttaggcaatgcttgtttatggaggctataattgtgcccaaatctgagtgaagattaggaattaactaggtccagaagctggagtggggaggagggaagaacattccaggctgggaaatggcatgtgcagagagtgtgagagacaggagtacagcacagtcctacaagtgaagtctcgaaattgatagccttagtccaagatctatacatgtattaaagaataattctcaaataaaggtgaaatcatgactctcatactgatataaaatgaaaacatgttaaagattaggtcaacttataatgagagaaccagccaaatattataactagtctaaagagaatccaaaaagcccagacacatttatatatcaggaatactgaaaagaatgttacaaatggagggcaaaactggtttctgagggtggggtagggggattaattgaacctccagagaacagaacacaatttgcttgcctataggcaagaattattttgcattgttatcatttatctataatttacagagttgaaaattagtcctcatagaatcagaatctgataatatggtaattgggaaatgggatcctttatattctagatgaagcaaagttttatactgaagcacaatttttttcctgcaaatgcttgaatcataatatatgtttatggtttagagctagttggatttggttttaagggcttgatagcatagatgttaccccaagaagtatggggtggaattcactgctaaaccatttatacactaccttgagtatgatccaccatgttgagtaaaatatccagctggccataccttggtacttccctttaaacacaagtttaacagatggcctatgactacctttttccttctcctggtaggaagcaagaaaaaaacctgagaagaagcaatcagaaagtcagactagaacttggctttcattcaggagcccctcttagaacaaagaggggctttccagtgaatctgaaaaccaaagtggtttgccaaggtgaggtgtgccacagactccagagggtttacaacagagaaaaaaatttcttcaagtgtgtcaggtagagtcttaactaaaagaaggataatcatttggtcaattaacaggatgactgttgctgatgagttttaattgatgatttgctttgttgaaatgttaaaccagcgttgacaggtactacaactctttaactggcactcccactcaggagtcatgtgttaaacacttacctaatatttgagagaatcaaaaaatcatcccgttttttctcttgtaaactggatgtgttcagtgtagacaccttgttttccatatcagggtcgtattgtacaaggagacagaattagaatggcacttttaatyctatttgtagcaagttagagttccaaatggcaatttcacgactgtttgataaaaaatgtcactggttttgattgagttgtgttattaacctctagctagagagtctttttatttttattttttgatttagtgcaaatgtgtctgacttctcagtaatgcatgctgtctcttgtttctgctagagaacgctggccagtagaataatgcatttcattggctggttcagtgcaaagactttaaataaagaaatggcaagataagaaagttgcctataggcgatagcagtgctgatgtttttttcttctccaaatgtagtacaagatattaaaactgtctcttaaaaatagcaatttgtggctgggtgcagtggctcatgcctgtaatcccagcactttgggaggccaaggtgggcggatcacgaaatcaggagatcgagaccatcctggctaacatggtgaaacccccgtctctactaaaaatacaaaaaatgagccgggcgtggtggcatgcacctgtagtcccagctacctgggaggctgaggcaagagaatcacttggatctggaggtggaggttgcagtgagccgagattgcgccactgcactccagcctgggcgacaaagcaaacctccatctaaaaaaaaaaaaagcaatttgttttcttctgctctaatcatgggtgaaagtgctgtgaaatctgtatcttttttttttttttttaactgtggatgattcagttaaaaggaaaaagttaaaaaataaaaaatcccaacccagcaaaagcaggcttactgtttgctaaatcaggcctctaatagtaaacagctcaaaaagccttccataatatttatgaacaatttctcaattttatacccagatatttctattacactctgcaaaggagataatctgagctgaacaaaagagaagagccttttttagattgaatagactggacaattcagtagcaaagtgcgtgattaccaatctttcaagcaaagcttttatgtaaggcaactttataacttcatccattccaaagagaaatgcattaaagaccatagggaaaataaaaggcaaaagagaaatgtagagaaatagcccattctttacatctctatagccacttgtttcatggctatcctcactgagttaacccaatttaaagccacagtgtaactttaaaaaaggcatttcactgttccccatggtagtcagtctacacaaataatgagaggacatgactaccattatttttcttccttctrttgttttaaaatatacttatctcttccactgtatgttcctgtgttttattgcatgggaaaaggtaataagtgtcatcaataacagccatcttaacatgctgcaggaactgtcaagtaacagtgattattgtaaaaaacgagctttctaatttccttgtcgcttacagagtaatctaagtgaaaatttccaacgtcctatctttacaaagaaacaaatacatttattttttcctctaatggaagaacttatgtacatgattcctacttgatggtagatcatggcacgtttttcaaagcttgggtctctcaccattgcctcagaatcacatgaggcacttgtaaaaagtgcagatatctgagttctcttccagagtgatgaaatctgattcttggggctaaggaggtgggggtgggggtgttggagaggaatgtgtagttttctcaaattctccagctaaattattagcacatttgaagtctgaacattgctttatgggaatgaaaarcctggtgattgtaataaactgttgaatgtgatatagaaagaaaatatgcagtagttgtggcagatgttgtatattctttatctcatactttccttcattccctagtgtcaaaaactcaaggcacagtctttttaacttggcatcaaagttctcaggtaccgatcctcacagaaagaggcatgtgcacataggcatcccattttgcacatgatttcagggggctgatgaccccaaagagcctgacttaagaaaaggaattctatagatgaaaacaaatgctgaattagggaaaatgagaactagtaaatttgacttaagttggtatcctactgctaattccaagtcaaaacaaacaaaccaaaaattgaaatattactctaatcacagacttcatattatagacagaagaaatcatgtcttatattgtgtacaagtattgagaattagcaaagtaaacatttaataatgttaaatgaattcatccccttgaaatccatccatggactttgatggctgctccttgtatccaggaacttttcaactaatgggattattttaaggggaaggggatgtgaagacaccaagtgggcaaggaagaaacatggcatgtgtatccaggccgcccctacagttgagtcttctgtgcactgaatgaagatgcatatctgaggtgtgggtgggggttgaaatgcagcttgtgcaccctrttgtgggacttcgtctctgcagggaggggaacttttataatttgccttttatttacagattgtatcaaacgcacacctaacatattctacctattttcagccatgagacaggctaagttcctgaatgttctctctcattggataaaaaactccatggataccagatagaaaatgttagtcctattgatctcaaatagcattactttggatcatatgggaggtgaccaaaattatttttaaattatttattagaataaactacaagtcaggactgcaccaaagctagagagaaattaagtatttgttagaataagctattttttccccactaatggtaacaatttaatattgggcaatcacatttcagtctaaaaaaattagcagcagtgctggattttggtctaatatcatgggacttttcccagtctacatgtaaatcatcccacctttgttgcagcagtggagaagggcttgtcactaggtcttctaatggactgctagagtttaattatatgttgttttatggtgtctggcaatgtgattcccctgcctgacatagtttatgagctttttaaaaataaagatcatgtgactttgtgttctcatttgctaaaaagcattcattctttgggttcttgtagatcctattgctgtagtgaacttggacctggtgttgttattttgtaaaaatgtcctcaaaatcaaatgtcactgaatataaagacagttctaattaattaatgcaatggaaaaggtaaaaggagggagcatgtgaggactctgccaggtgctctggcctttctgtcagagatgaaaccatattcgtaatgtgaagtaggggtacaaggactgcctccattaaagagcaagagatgaaatgcccatgtgagtgcagcactgtacatttagttagacaaatctccctttaatttacagcttcctagagagagttatattctgcttctggtkgcctgcggttttatttggttaccaattatggaagctagttgtgtttcaggaagccctctgaaaggtgtgcatagacaataaatcctgtgccttgctagacgtattgatggttctgttgatgagaggttgcacaaagtcaatagttgattctactgcgtrgtgacatttgcatttaataaaaagtcttgtttattgtagcttctgtataaacacaactggcacctactgtgtcacagtggaaaatgctaagtagaaaagaaaatgtatggctgagaaggaaacgtaaatatgaatgattaytgttattttttgtttgttttaaaataatgtggacctcaggtcacagaggtagattaattataagtttggttcatgactcactgtcatccatggtaaattctgttttattttataatatttatttcataatataacaggcataaacccaacaagtaaatattaccaataacttacaaatttgtgcccccttttatcccatctctacctcttcgtaagaggtaaccaactactaacctcatgttcatcattccctgtcctttttaagttttatatgtactcctatcaatagccatttagttaaatttttaaattttcttctatgaatggtgctgctatgaatgttcttatacacatttcctggtacatatgtgagaaagtaaaacatggctctactggcaactagaacataaacaatactcagaacaaggcataaacaaagccattctgtgaccctacaaatgactaaacacccctttcttctgactatcactgtctttctcagagtgactgctgcttctgggcaaacttcagtttgtttcaattccccaaaccctagaggaagccactgataattcccctttactaagatgctcccaaggttcctctggggtactttctcctttgctacagtaaggtgaaccacttaactttgactaccagggtgttcctggtggcctttcactgatggagtttgacatatgtgctcaagtttctcttgggtattaatatatactcagaagtgaatttgcaggatggtagattatatgaaaacgcaaagcttataatctttaaaaatcttgccaatccccattcaagtgtgtctcatcacatcttactttcatccaccatgaaaaaaataatctacttgacccatttctgcgcacacattaaatgtgcaagacaatctgtatatatatatagatgtatcccttacaacatatggacaactcacttcttttctttaaaggaatatatgtttattctctctgttgtcgtatggtattttcagtagttgaatatgcttagcaaaatttatgtttagtctgtggtttatttatctttttaaaaattcaggtgaagaatcatatccatgaggttttctttaattatagctgccttttcattttttgagtgacccaaaacagtggttttccaaactttagtaggcatgtaagaatcatctcaagagtctgtatttgcaggagaatctctagaggattgtaaggtggaaagagggtcctataatgtgatgcaaatagatgaattagtcaccagtgtcaagaggaaagcccccttgcagagtcatgctttgtctcacctaaaaggtgaagcattggcatgatgttgctaattacagaaagatgttaatgaagtggatattaaactgaactgggacacagtatagattataccataagtgagtggtatttggtgaatgaatgagtgtaatgcaagggaaattatataaactttacctcttaaacttggaggaggggtatggtattttcttgaatctatttaaaattttaaatgtataccatgtgtaccatgctaggtatacatggcaaaccaaacagacaaaattcctgtctcagggactttgggttcttggtggagagatagaccacaaacaaatgatttcaacattatttagggaccgtttcgataaatgttatgaagaggaagttcagggtgctgtgagaatggataaccggggcctcccttagtttggcatctccccaaggtcaccaatgtttctgtgaaaaagtgaggtttaagtagacttaaaaaatggtaggtatatgagttaggggttccaagaccattaccaggttcaatgatttgctaggaatactcacaggactcaacatatagttgtacttgcagccatgatttattacagcaggataaaaagcaaaatcagcaaagggaaaaagcgtatggggtgaacttcagaggaaacttgatgcaaggttctgagagacctctttgagtggagtcacataggacatgcctaattccttcagcaatgagttgtgacaacacatgtgaaatgttgtccaacagagaagcttgttagggcatcagcacccaaggctkttattgggggctggtcacgtagatactctctggctagcacataccaacattttagactcccagaaggaaagcaggcatttagcatttcattatttgaacaaacagttcgggcacagtgagccactcttatcagttctgggaatgatggcaaccttcccaaatccatgttcccagatgccagccaagagtcaactttgcaagcaggtctatttctcttatgtctcttttatcatcataaagtgaagtytgtagatattacctacctacctgcaaacttttttaaattctaaaaatagcaacctcaggccttctatggtaactcttttctgcacagcataatcactgacaaaagtaggaatgaagtagcatgctgtcttagtcttgctttaaaatatttcaacgaagaagaaaaaaaggagaagatgaatgaagcaaatgtgggaaaatcttgatcattgttcaacctgggtggataggtacttggagcttcattatactggtctctcattttatttgaaaacttttataataaaaaggaaaaaaaagaaacaagaaagaatagtaggtgttgactaggcatggagagggctagagtttgtttatttctgttctatttgattcagtttaattaaaaaaattaatctacctmcttcagtttaattcaatcaattattatttagcatctgtttttttagggctgtagcaaagtcctgtgaaagttacaaaggtcagcaccacattgaatctctgtgtctgcgggctcatccatgaaatgggtgtgctcataagttcccctctcttatgaggggactttgaatatccaaagaattgttggaaagtgaaagaaaccagctgctccaagtttcattagcagccatgaatgttataataaatgtagattgctgccttggggaggcatgagattctcttactggcttggaagaatattcaatgaggcagaaccttcctgaagagagcggaaatgatggcagggatattgcctgggagtattgcctttggcagtgscttggcaggggaagaggkcctgtcgggtcctccctttgagggggtgagatgatgtgaactagcttttatttaaaagggaatagataagctattgaattggagcgcatctgagggctttatttgaaaatgctttcaaaagctgttttgacaagaacagggaggaggcagtggtatcattaaataagctggcaacttttgtaaccagcattttggttttccacctcaagggagagtcaataaactttgattcccagcattaatgtaattattttgatttttctggctcattccagggaaggctgcagagctgcaatatcagatggccgaaagcaatgcagaaatcccatgtccccaaggacacgcgctgccrttcagaagtagcaggagagggggtggaataaatcatttcctctgatcttgttagtgttgagaatattttagggggtagcaaatgcattgcaggtctaataccagaaggctactgcaggcagaaggaaaaaaaataacaaaatttctctgtttttcctttaaatatgatttcctctttatatatttttaaaattgttttatgaggggtttttcccccctttctgattctgcaggttcttccttctacattatcatgttttctgtcatccagggattcttcctgatactgcccctggcagctgtaatatacttaatgtcaattgttactccagtaatatgttcggttcatttagtgtaaatggtcctatcattctgggaggtttccctgagccaagtgagaaatggctttcatgaatatccaggcttgcatggctagaggaatctgccacgtgcgagcctggtaattattttttctttctagaaaatatactgtatttaatttttaaaatgccagcgatttggggttttttaagacaatgggcagttgtggaaagaatagagcagttgaaatttcttcaagttgggagcagaggcacagaatgtattcatcttgaggagttaaactttgatgtgaggagatrtacatagttgcaaactgtgttttttcccttgtcccctaagaaataaaattaaaaggtgatatgtatgtgtttacatatttcattttttacaaaataatatcaagacttgctaacaataatttaaggctgggcccctcttactgtaaattgtaaacatacctcgaggcctaggctatggacattggctataaatcaccattttcataataacagcaacaacctggccatgactttcagaatgctgtgaacattgtcttctgtaagcaaacttccacttacaagttttaggcctctgatattagaaggtcagcattccttactcaggtatatctttacctgagaaaggatttttgattttactttctccagtaaccttgtcaatttgagctccatctatatcaccaaaatgatctgtcatgtcactcaaagacaaaaagtgaataaagcccaagacattagatgtttagcagtttgaggccaaagaaatctggcaattttgactttttccaactgggggttcactatcatcagtcatttgtttagtgtctacacactcttttctaccctttaaaaattgtatttcctctatttaaagaagcatggattttccatattttaatgtttctgaagcaatatcttacaattgatatgctcacttagcatctatttcttcatgttatcagccaagctatcattaagccaactatttttcaatttatggcaacttggatttcaggagatgttatctctcaatttcctcttcctttcttcatctctgctgctatcacttgaacttggaccactattgtctttttttttttttttttttgagatggagtcttgctctggcacccaggctggagtacagtagcgtgatcttggctcactgcagcctccgcctcccaggttcaagcaattcacctgcctcagcctcctgagtagttgagactacaggtgcgtgtcaccacgcccggctgattttttgtatttttagtagagatgggatttcaccgtgttagccaggatggtctcgatctcctgatcttgtgatcctcccatctcagcctcccaaagtgctgggattacaggtgtgagccaccgcacccagccccaccattgtctttgaattaaacatttggaaaagttggctaactcgtctacccacagccatctttcctacctccaatccatttctcattagatgccatactgatcttataaaacacagctatgatcttctcattcctctgtttgaagtcctttcgtggcttttcattgcttttaagacaaagacctgaataattacagtggtttgtaggactttgcctgaccaagcccttgctttctcatctcatctctagctctacctctttctccaacctccatgctaataggtcagagcaccccaacttcagtcattcagaagccatgtatttaccatattcatgtcctatttgtaccaacacttactattaaaaaaagcttatttttgctwatatttaagttaattgtacaaggaaattgttttgccaccttaaatggaaactactgttcttctaatatgtatttcaaaacacttgaatctattaaaattaaaaagttagcctttttatcagcaaaagttcagctgtgtgcttccaggggttcacttaccactttttggcaaccagttctctagctgaagctctctgctctgttatctctgaggattcttctgccttcaagggtttggcctctttttctatctccctgatctactttcccttcacttagctaactcttacccattcgttaagtttcagcctaaagagtctctgccccaaattagattccagtcaactgtttaatcctatcagattaactgccctcttttgaactttatagaaattacctacccacccatatacttaaaaaaatggtatgatggttaactacaatataaagaagaaagaaaagggaagtggcttacaataagctaagtattccaatgtaaaggcttgggcacaactctacttgaagacataatgaattaatcaaatgcttatatctacttgatatgagtgaaattggatttaagaaaagaatatcaggccgrgagtggtggtttatgcctataatcccagtactttgggaggcctaggtgggcgggttttattttctcctcacagttgagctcaggagctcgagaccagcctggccaacatggtgaaaacccgtctctactgaaaatacaaaaatcagccaagcttggccgcatgtgcctgtaatcccagctatggctaaagcaggagaatcacttgaacccaggagggagaggttgcaatgagccaagatcacgtcactgcactccagcctgggtggcagagtgagactccatctcaaaaaaaaaaaaaaaagaaaagaaaagaatatcacaagccattctgtgaaatgagtacaagaaatgaaagatgagaggtttgagggatactagaataaaagctaacctttggatacatattaatagtaatatacatgatgagaaaaagagggaaataaccttagttgaagtagagctaacatgctaagataaataatgcagttttgaggtagagaacataggcaagtatgccattyctggaaatgagtgggacttacttaaaagggtagctgcagagtcattccctatattatgaaaagggactgagtggtgttgaagaatcacaggaagaatacctctcatcttgaaatcatgtcttatgttgatgcatacatttggtctctagttcttwaaaagcacttcggtaggccacagggaatagggaatggattggaaaaagaagcagtaatataagaagccataaagaagttgtgtgggagacctctagggacagtttcactgtaagactgagaaacaagaagcaaatccaaagtaagtaaataattttaatcagtaattttcacagtgtagatttctcatcattgtgctacagattttttttaaaggtatgtactgtggcagtaaaatgaaatataaaaaaaatgctttccatgaatgcaatttggtggtatccttgactttcatgtcccatggccaatttaataatatttggtgctaggcctatttctctcttacgtatttgcatttgacagataagaatgcaaactaatacagttgtgttatattggtagactgggtaccaaaagccccattgctgtcggtggtgggattttctgaaatagtgaacaactggtaaagtgttgaacaaaacaaaatacattattccttcagtttaaatgctagttgcatttctgaaaaattcagtgaaaattaaaatgtgcaaaagatactttaagctattatgtaaaatagacaataatattttttttctttacctaagtgaatgtctggtggaacatttgaaagttatgagggatacaggatcatttttcatcatgtgggcctgtcctacataagaacatttggtggccttgttgcccctcagaaaatatgagttaaatggctgggcatggtggctcacacctgtaatcctagcactttgggaggctgaggtgggaggatcacttgagctcaagaggaggtggagaccagaccagcctgggcaatatagggagactccatctcttaaaaaagaaggaacatagagagctccccaccgctcctcacatttccaaaaaaaaatctctctaggggacaatacaaaccccattgatcactaccatgtaaaagcctctcagtgggctctgtatcttccttcacatttagcacacttttagtaacttgttctttggctgtcttctctgacagtttgaaggttccatgagtccaaggaaagttggactcatttatcattatatctctctgcctgggacagtgccaaacatatggaagattttcaacaattacttgttgaatgaagaaaaggacaggggcagtgccttaggctccatttataggtaccttggtaaattaactggagagggttggaggtgacacttgactagtgtacccatgcatctgagtttgctcaggatagccctagtttttaccagttttctctgcatcttgtccagtttagcatttttttatatatacatttttttgagatagggtctcaggctgcagtgcagtggcacaatcatggcccattgcagcctctaactcctgggctcaagcaatcctcccccatcagcctcccgagtagctgaggctacaggtgcgcaccaccacatatggctaatatttttgtattttttgtagagactggatctcactatgttgctgaggctggtctcaaactcctgggctcaagccatcctcccatctgtgcctcccaaaatgatgggattacaggtgtgagtcatggcacctggcccagttaagcattttttaaaaataaaaataattttactttgggaaatcattttagaataggactgtatttcaactgtcaaccagtaaaataaaaccaatttttcagtcaacaggtggatatttaaaaaattaaattatttttaataatataaataaaacaatttttatttattaaacttattaatttttatttattacttttatttaattttattaccctgcttcagtctcagaagtgtctcattttggataataaattatttatagtcaccctaggcatgatccttagcaacatatcagaaggttgtccttgtcattgtacccaaagtaaacccttctcttcttttcccctggcatggggtagatgtcatggaaataccatctattactctgccatccactggtccaatttcaatggtttctcacttctctgaatgttttctgtgactggtgatgacctttcagccctgaaatatttgcctcttaattatttgagaggtttacttttagtttcatcaattagttttctttctctactatactttcagttaaacgtaagttttaattgttaaaactaacagattgagagtgtttctatggaaaactttatgcctttgagaatctttccattgtggcatgaagatccagaagaagcagtccccactggggcatataacttctttctcttcttttgaactcttcatctargagtatgagattttacaaatttatgctctgaattttgttcattacattttccttagattgaaaccaataagttatgaatttttaaatatactgttaaaataaaataaccataaaaggaaatattagaccttgccttaaagttaaaaactgtatgtcgtatattttcccttgtattaattcaagagaaattattgcatatgctcatgaaaaagacatatacaagaatgttcatggaagttttatttataatagccaagcacttgagaaaatccaaatgtctatccttagacatcattgtaaacaaattgtgacatagtcatacaatgaggtggtactcaccaacaaaaaggaacaaacaacaaatatatacaatatggatgcatcttgaaagcattatgttgccaaaagaagccacaaacaaaagaatgcatactgtatgcttccatttgtgtaaaattcaatagctgacaaaaggaatcaatgatactagaagccagaaaaatagggagctaggagactattgctagaaaggatcaggaggtaattttctggaaataactgcatactttgttttaggtggaagattcttgggtttatacatatgaaatgccatggagccatatacttaagatttgtgtattttactatatataagttatccctctaaatataccatagagagaaaataattcatatagaatttctttttcattaaaagatgatgtgtgtttgtttcgaacattaataaaaattaaaagaaaataaatcatcgatagtctcatcacataaataactttcttccagtcttttgtctgggcatagttttttgtttttttttttaaacttttctcccttctatccttctttctatatgtatttaactggacttttgaatcctagaataattctttctgaagttaaaataagaagttcatttttgaaattacatttatgatggatcgccttcacattagaacatttatcatgaatatactggccaaatgataatgtcaattgtagctagaaagaacttggaatttgtttgtagttttttccaagggtgaaaaaggaactggctttcctgtaaatgaataagttgccatgattctccctaaatctttacttcatttatttttctgctccctgatctcatattgtattttcatacagggttgccactgtaggggaatcattttaaacccatggatgtaactattatttttttatattttcatacatttataagtcttctrtaaatcttgatcgaattttttttgttatcttcggggaatagccatgaaggtctcaatactgggaaatttggggatatcatgcagcctgacaattcatcacacactgttcttaaaattcatattgcagcatattaaaattggatcccaagattccttgcagaagaaccttggcactctgactcaccttatagtgagccaacatgacagaaaaatacatcatttttttctaccgtcaaaggaaacaagtatgaaaataatggaaaaacgtgtagtctaaaacaaagcaacataatttgcagtgtgagttgcctaatgtattatatagttattatctcgcctaagctccctaggtaatataactgctaatattaaaaatctgttttgttttgtcgcctcaacagaacgttttgccttgagacttaattaatacatttctgtcttaggcatgtattttagacacactgggtgtacccttaaataaccttcaggaacaatactcatttctgcactgttttgagaggtagaaaacaacaacaaaaagaacttggtactctgtgttctctctgtaaccagaagagttttgttggaagcatctttattagaggcagctrtcagtatgggatttatttccactgggtggaaacaaaaggtgctacagaggaatgtacataaagatatcacccatgaggcatttggataaataaaagtgggcaatattaatgatgctcattagcagatgtcactgttggggatgaagtaaattccacaccaaagtgtttcatatattacacttttcaaaactgtcaactttttgactttgatgtatgtccatgtgaatagttttaataagttcctacagtagtttctttgcatataccctgaggaattctatggaactgctggcagcaatatcacaaagacattttttgcctaatgattggtgcttcacttggaaatgtgaaggctcagatcattacattcctacttattcatggtgcaaatatttgtctaagaattagttaaaaaatattgtatgaccaagcagattctgtagtttaaagcaatcttctatgggctgttgcctgtataacagaattacgtatgcataaaactgcttttactgtagaagccaaaatgcagaataatagcttgtcaaactgtcgtttgcaagtgagatcatagattttatagtccaaattaggttgtgttcttttcctttttgtcaggtcatattctaataaccatattgtgcactaaaccctgtgattatcccaacacttgacagatggtaggctgttaatttgtatgtaagagacagtgattgccagagccctaacagtattcagcaaaatatgaaatgtcaaaatccacttttggttccattttgcttgatttcattttagcaaggtaatgctaggcagaagagtttcagtagctcagcatatgtttcattttactactctgtatggttttactaaccactagaaatagaaaggattaagaaagaagtaatttgttttatrtcgtgctttctcctttcctgtggagagtgatcatcagcctgaagggttaattgaagggactgaatgagagcttagggcagacaggatttaattgctcaatattgtggataattgtggtacagtagtagcatacactgatgtttataagtatgatggggacaaaataatttaaaagtttaagttaaaagtgcactggcaaattcactaaaaaactattggaactactaaacgagttcagcaatgtggcaagatacaagatcaatatacaaaaataaatcttatttctatatactagcaatgaacagtctggaaaagagattaagaaaataatcttatttataatagcagccaaaaaataaaatatctaagaataaacttaacagaagtataagatgtgaaaactagaaagtagttgaaagatattaaagaataaataaatggaaagatatgccatgttattggatcagaaaacttaacatttttaagattgcaatactggccaaaatgatctatgtatttaatggaatccctttaaaaatcccagctgtttttttatttttttccccagaaagtgacaagctgatcctaaattgcatgtggaactgcaaatatccagaatagccaaaacaatcttgaaaaagaagaaagaagtttgaagactcacacttactagtttcaaaacttactacaaagctatagcaattaaggctgtgtggtactaacaaaaaaggtagatcaatagaatagacataaaccctcgcatttatggtcaattgatttttaactaaagaaccaagacaattcaataggagaaatattagtcttttcaataaatgttgttaggacaactggggatgtctacatgcaaagaatgaattaggacttgtacctcacaccatacacaacaattagctcaatatggatcatagacctaaatttaaaaggtaacagtataaaaycccttggcaaaaccatatgaattaatctttgtcatcttgagttaggtttcttagatacaataccaaaagcacaggtgacaaaatttaaaaaatagataatttagactttgttaaaacttaaaacttttgtgtgtcaaatgacaccatcacaaaagtaaaaagatatacccaaagatgggagaaaattttgcatctgttgatggactagtatctagactatattaagaacttctgcaactcaactgtaaaacaacaaataacacaatttaaaaatgtgcaaagtatctgaataggcattttcccaaagaagatatacaaatggttaatagcacacgaagagatgcttagtatcactcattactagggaagtcaaattagatcaaaccaaaaccacagtgagataccacttcatgcacactagaatggctaaaatagaaaagacaataacaagcgttggtgaggataaggagaaattaaaaccctcatatgttttggtgggattgtaggatggtgcaaccacttggggaaaaagtttgacagttcttcaaaatgttaaatatagagttaccatataacccarcaattctataccttcctaggtatgtacccaagagaattaaaaacatatccacacaaaaacttgtacatgaatgttcatagtagcattattcataattgccaaaaagtggaaacagttcaaatatctatctacaatgaatggataaacaaaaatggcatattcctataatggaatgttacttggccataattagtaatgaagtgctgaaacatgctacaatgtgaatgaaccttgaaaacattatgttaagtgaaagaagctagtcgcaaaaggacacatactgtatgattccatttatgtgacatttccaacagagacaaatccatatgcatagtagattagtggattaatagggctgcaggggtagcggggaaattggagtgactgctaatgcacatgggctttctttttgggatgaggaaatgttataaaattgattgtgttcttggttgcacaactctgaatatactaaaaatgaatgaatcgtacagtttaaatgggtgaattttatggtttgtaaatgtatctaaataaagctataaaaaagcacattggcaatagaatagtaaaggtaattcatttattatgttagcatgacaataattgcctggactgtcaatattacactactagagacaaaagaatgcaatttttcactttaaaactccaaaaacagatctgcagttttgtttgtttgtttgtttgttttagacagagtcttgctctgtcacccaatctggagtgtagtggcacaatctcagcacactgcaacctctgcctcctgggttcaagcaattctcctgtctcagtctcccgagtagytgggactacaggcgcctgccaccatgcccggctaatttttgtatttttagtagagatggggtttcaccttattggtgaggctggtcttgaactcctgacctcaggtgatccacccgcctcggcctcccagagcgttgggattacaggcgtgagccactgtgcccagccagaaaattttttttaggtattaattttcttgacacatctgaatgctaaataacgacaagaccaaggctagtcaaaggctggtcaaaagctttcctctgcagcaccataactgtttagaaatgccaaatgaccagtggttttccaatagtgtaagcaactatctctcaaaaacaatcacgtaacacaaaacacataatatgcatgcactctaaatattatatgctatgtatattataatgtattatacatacatataaacatacactatacataaacattagaaacttataccaagttgtactcatgactgtttttttctttcccagtaatccttcctaaggattatgtcaccatcttatttttccctgttaattggttggatgatttctgttgtaaaacatttcttttaaataaaatgaaatggtgatatcatgtattattgtaatttaaaaagcagttggtatcttttccctcaaacttgtatcttcacaatttgtaaggctattattaattttgtcatattgtggtaarggaagggtaacattccatgcaggtaagaaacaaatctgaaatttactaaagataaaaaaaaattccctggtaaagaaacacaattttaaaatacactgtaaggtacatattaacgatcttcactaagatagtgaaaaaaagctttaagtctacctttttaaaggattttgtaggttaatattttccctttctttctttctatgtgtcagacttctagcttttcccctaaaatatgttcattacaggctaacagcctaattttaaatattaacagatactcttgatatgtttgaattgccccttttgataatggcatggcttaagaggtcctaatgaaaaatgttaatgtacagataatttgtggaataattttttattaaatattataacaattattttttctttttctatgtcatttttgtaatgatcacttttaatggttgcatggttttccatcctattgttatgccatgaggtagcgaagcacactaaattttagacatgagctggagcacttccagcccactcatttaaaagaggaggtaaggtgatcacagcaggttagcagtctaaagtagaaccctggtatctttttcccacctcagtgattagagtcacattcaaatacatcattgacttgatttattttgcatgcagttctcagcagcacttctgtagtacaaaatgatgcataatcacattgttcttagatattgggagaaaaaagataaaagatggaatttaataccaaagcttacttttgactcagcagactaaagttttagtcccygggagaaaagggaatcagaggagagagcaacctgatattttctatacttaagagtgaaaccaaaattggaaaaaagatataatcagaacccaccaccatcctatttcagcacagcatgcaattctcagataaaaaaaaaawwttttttaagagaaagcattttaagataatatctccatgagccatttctgtaaaaagcaagtgaagctttgactccccctgagaaattgctttgcaattgtgaaggtgcagagccatggctctgggaggcagattggtcctgtaggcttgtgtgaatgagatgatctgcatgaaacttgagtagtaaatgagaacccattgtagggcctgggtgaactgcagtcatcccggtgatgcagatttcccaaagaaagaagccctgagtaaccaagtattctattgctgggaactggtacgaacttggtaactgattttgagaaatgtcattgccattacaatcctgagaaagctggagcctcctctgggtcagccaattgaagaagctataaatgacctccgtttttcactgaatcagggaaacacaaagcagagaacattggttcttgatttctttctttctctccttcctcaacccaacccactcaggctakaaaaaagaagtggaagctacatcgtaagagatagtttctgtgtcctgtttctgagacacattctcattgcttgggtggagtggctgggaaggatgtttagtattgactttcaaatgaacggatcaaatatctctctgggctacagaatttctttatctgatattgccacaacaggcagctcagaggtatttgtctgtatccctctgggcctttcttattctgactgttgaatgaaaggagcggatgactaagacttctctttgaaaagaagtccattatcagtgtctttgaagctccgaagactgagtacattctacttggataaagcaccacaataggtggaaggaagcaaagacagccttataaatttccctgtgagcaagcagacctattgctgtctttattaaaaagatgccaccaagcaggtggtcctgttctgagtgatacccccgagagtcggcttgaaagaaatcaccggaaacytcacatctccctaaaacagcttaggctgtcttgagaaatgtgaaaggtgatcagatgactgtgccaagygttctgggtgtgttgaacatatgtatcctcaaattgtaaaacttgaaactttggcaattatgttaataaaggtaagcaaactagttgacatcaacacatgcattctgtttcttctttgtacatccgtgtacctcccagcgaggactgtgaaccagattccgtatgtattcaagactttcattagataagaatggcatatacttatcattagagcatactaattaaagcagaaagtgacatttcaaagtaatgatgctccctagtgtctcaatgtaaaatactccctagtctatttttaatgaactggtatgctatgtatgtttaaaatattattttgttattttgttttcattatttcagtggtggctatgaccaggaaggtaggacgttcttctagatataaggaaagaggccagtgaaacctaccaagagcttcgggctttgattgtagtcatattcagggtgtatccaggcattcttgcattcatttggtgctttgactgtatgcttgctacttgatactgtctgtgctaggttaataggacccagatagttcctgccctcaaggagmttacccacgccctttgattatgatcaaagcaaagccgttctttatatttcctcttttgcatactctctaatagcaaaaaggatgatatgttcagtgctggttatatatacacccttgccagttactacaaactcttaggtattcttagtggataaggatagctaaagagtctccttacttattctatatttttttccttatatttgttactgaatgcattttcctcatagtaaaagcagacatcatcgtcatcatcatattcattgtttattaagtatagaaatccaataagataggtatcactattatttaaatgttttatggaagactgaataagttcagagtgtttaggcaacttgcccaaagctacagagctggtaaatgacacagtcaggacttcttgacctagggctggctgcccccaaagtgctcttgacctttatgctttaatgcctctcattgtttcttattttttttttttttttgctttctcttgcatggacagctgttaaaagtcgttatcctcatagatgatgatgagttaaatacttaggttgtctttgatctgtgagtgaacgttgccagtttttgaatctttttttctgatgaattttctaaaagtgaatttcaggctttcaaatgactgtgctcagtgatggtgactgattttagaccgctcttgctattcaaattcacttaaagtaccagcattccttaaagtgatgtgtaccgcaaaccctacttgtaagattatagtaccacatatacatgagccaagattcaccatttgaaaatgagattggtcttcatgctacagcaaaatttattgaagcgtctattacatgcatactctgctattcaaattcatagaggaaattctatttatttatttattttccagcctacttctacaaaggatttgaggcaagcaaaaaactacaataagtgtagtttacttatcaccgagagctaaaaattcaaaggcagactatttttgtgaaagagaatgatgtgagatcttgatactggtcctggaattgatgtcccatctctaaaaacaaggtcccacttcctaattccatcacattgggggttaggatttctgcatatgaattttgaggggacacagacattcagttcatagcaaagatgtactggtctacaattcttgttttttgttaaagagattatactgcaataaaaaataagtttgatctttaggaggccgaggcgggcagatcacgaggtcaggagatggagaccatcctggctaacacagtgaaatcccgtctctactaaaaatacaaaaaattagccaggcatggtggcacatgcctatagtcccagctactcaggaggctgaggcaggagaatggcgtgaacccaggaggcggaggttgcagtgagccgagatcgcaccactgcactccagccttggtgacagagtgagactctgtctcaaaaaaaaaaaaaaaaagtttgatatagagttgcatacggggctttatttatgggctagtaagggcccacagctgtggttcttctttatttttttattatttaaagatgcaggaccttcagctgatttcatttggttggaaattctagagcagcagcataacattttgaagtcaaatggttaattttctttggaggcctttcctcctttggttattggatgctgtgtctatgttctttacactctggcagtgaggaggaagcccttgtgtgacaatggatttagtggggtataaatctacctaactagcagttggatgggatctgatgagggttggccccagagccaagccacattagccgagttagaaggatgtgctgatttcaacytcaagccacggggcccagcagagaactgctgggaagcaatagcatggcctgttgtgccaccgtcatttttgtcagmgccaccatcatcaccattaagcctttattaagtgccagtgtgtggagctcccttaggtgtcattgcagtctgacaggcagctgtgtgttttaaatacgagccttgctcagggccatgaggtgaaaaggcccagctgtaatcctaggcaggcccacargcatggctgcatggttagttagtggctgtagcaggtttttgtttctggtgtctgctcagcccatggcccctttctctaagaactgtcactttatcttcaaggatgggccctggtgatcaggtttttaacttggctcccaggctgtggctcagtagatcaaagatccacagctgactcaagctggaccagccaggttgtctttctcagaagtgtggtcttggactaagacatatttgtagatagactaggtagatgtgtaaacttgggagcagtgggaagccatgtcttagattaattcaataatccttgtaatactcctatgaggtgggacctcttcttattcccattttgtagaagaggaaactgagtcacagagcggttaagtaatttatccaaggtcatatagttggttaatggcagagccaggcatgaacacaggtagtatgagctcatacttgtagccactgtataactgtctttcggagcaagagagagggagaaagaaagagagaggaatacaacaggcctctggagatatgcagattaaaagactgtgtgaggctgcagggagagaggtgggtatggggagagagtaagactgattgactaagagagtagctgccttgattctgtaggctttctagctccaggatccagacctcagtgtctgcactttctaaccttgggctctgagaagkatctctatgtccttataaataaatttcccttttgtgctcaaagcagtttcaatggatgtctgttacttgcaaccaaaagagtcttgactaagtgaccacactgtcacagtttggtaaaaaagacagtgggtcatccactggcctttgtagccccaggtatctttacattatctgtaggtagcatccaggctagtagaggagaaaggcaagtacaccagtgattgsagcatagtgagacagggctctgaaagaggtaagcgcataagttgctatagaaacttagagacgtggccaaaaattgagactgggatagggtgtggggaatcaggtcagcttctcagaggggaaatatttgagttgtgttttgaagaatgggtaggatttagccatatgaagaagggacggaaacaagggcattacaaatagtgagaagagtgtgtaccaaaaaaaaaaaaaaaaaaaaaaagagtgaaacctatkatacgttttagaaaaggcaaactattcagtgtgatggggaagaaggaaggagcagggatatgatataaaactggagttcttggggactgtgccacaaagagtctgcagtgctaagcartggagtttgaacctttgcctgtaagctatcagttcattgagtatccagttccttccctccctccaacatggaagcatctctagattctgaaattacaaagattatattctgacaacattaaatgcagttttagaaacaacaacaatacatgcagaatcctaacacctgacamcagtgttttcatttttgccaccttatcttctagttgtcctcaaacacacctgtttttgcacatggttgcaatccattgacatatcattttcactttccagtagattaaaaaggttttccatgtttctatgttgtcctctcctaattattataacagcatgatagtccttcattcgacagaaggttttcctgagtaccaacactgctccaggcaatgtgttaggctccggtgaagcaaaagtgaatgacttggacactcctgcctttgaggaactcaggatctggtatcccagtctctgctgaagcacttagccrtacgtattttaagcatgtggttttaatattgtcattttatttaaaaagatattcagttctttgagggtcaatttcaaatccttttcttgtatagtcactgtcctcctacctccaacccccattgtaagtactctgtgactaaaacatagccacattttcctctgattctgtgttcatgcactacttacctagttttttgcatatcttatgcttcaagcaccccgaaagctgtttgatgactaaccataaacaggttccaaatcaagtttttgagccaagttaatttgattatgaaacattatcttggttgtggcaaatgcccagtggtcattattttaatgatacaagcctctacagcctaaactaattacaaaccagctttattctgggagtggcgggtgggtcgggtgaggggggtgggggcgtggtgacggtggtggtggtggcattgcctaaccagcctccctgaggctaatccaagtgtctggggatatgggatatgatcactctctgcttttccttcacctggtcctccgtggatgttgtctacctcattccctctccctccttgttcttgtgttaaagaaaatagcgatggttggccaaaattctccttaaattaaattttgcctcctacctccagcatgatcatgagcctccaaattaaagatgcagacaagttttcaatcagatttgccttttgttctgtatttagatgcttttagtttttccctttatgatgctttttttgacttcaactagctctgtgcttttggtggtattttgtagctggtttttgctcagttttctatatctaaacatctttattttcygtatttctagtccacgtatttgatgaaaacacattgatcaattggtataaattttttaaaatttaaataaatgtattcattaaagagtctagaagtgcttcattatccatgtaatgaagaaatagacagggaagataaataaactaaattctctagtaaaaccagaaattcctcatatctgattttactgtgtgtatgtgtgtgtgtgtgtatgtgtgtgtgtgtgtgttcgaacacaaggatgcaagtgtgggttattgacatacacttaaaatgaaataggttgttacctcatagatcttaaaagctttaaaaactctctaagcctcagttccttcctttataaaatgggaacaacaatactaatgagtatatacagttgcagggatgatttatttgatgatgactataaagtgcctggcacatagtaagtgctcaataaatatcagtggttaatatgcccttgmcctagaggagtacaacgccttctctatgatcttaactttgagctattagtaagtccctaagttcatatttttatgcagaggccaaaaatcattgaaagaaagcttagaccttagaaaacttcccaagccactttctcttagcattctttttttttctccttaactagcctgggctgaatgattagccatttccacctagttctcaccaacactacctttgtggcagatgcccctgtggccattttcacagtccctctgtgaaattatctctgatttcagcaacaactgtggtgaccagttttgtccaagtcagcttcccacctctagcccctacttttctgcttttctgctttcttccccaagggcatctcttatgctgggagtctgcatggcctgggctgaagaggagcctggacgtctgtgggaataaatgccctcagaggctactctcagccactgggcatttgaacatgtgaataagtgctccggcctttgcgattcaggtgaacagttctggaggcawgctgtgtacttctctggaggttctggccaaaccagcctcttgctggtttggcaagtggtaaacttgataatgtacccttagttggcttttgctcttccctttttacaccctatttcctcatctctgcttcctggagtcatctctcacataaactcctgcacctaagtccttgtctcaggttttgccttcagggcaacccaactcatgacaaccctaaaattttctgtcttcttgatacttctaggactctgcccatataatctttagccccagatcatttctccttcctttgaagagatgtctcatagctttttgaagtcagactctttttctttgatcttgatcctatctgctcttaaatcctgtgggcccacagaccattatatcctgtttactgctatacttccaatatagaatgcttggaccatagtagaagctcaacaaatacttattgaatgaataattattttcttgcatgttttttagtttccttctgtgcacacctgctgttttcatcactgttttcagcttttctttgggagtttgggatctcttgctttagaaatagacaytgcctgaatcccagtgcccaccactttctgaggcttatgagccaaccccctacccttggtaatattgggccccactaagcactttctctttcttgagctctacctcccttgacctctttgtgtgtgtgtgtgtgtgtgtgtgtgtgtgtatgtgtgtgtgtgagacagagtctcactctgtcgcccaggctggagtgcagtggcgcgatctcagctcactgcaacctccgcctcccgagttcaaagcaattctcctgcctcagcctcctgagtagctgggattacaggtgcctgccaccacgcctggctaaatttttgtacttttagtagagatggggtttcaccgtgttagctaggctggtcttgaactcctgacctcagttaatccacctatctcggcctcccaaagtgctggcattattacaggcatgagccactgtgcctggctccttgacctcttaaaatacaaccctctcatggttgttctcctggctctcagactttctttcccagtatttttgctgtattatttagtttgcttggattctacctctggctttcttcagggctccatctttgagcctcttttcttctggagtcatatacttaacccgagtaaagcagtgactctcctctcttccactacatagatgattcctaaatctataatctctggattgactgctgagtttcaagctatttgaaatctccatctggaattcttgaagatttttccaatttaccttgtttattctggaattcattttcttctccctattttccccttttcctctttttctatgttctgtcttagttaatgggatcaccagctacctggcattgcagtatagaagtctttatgtgatccttaagtgccttcccttattgcttccaaaatatagtttttgagttcctactaaaagctagatactaggaatacaggaaccacaaaacagacatggttgtaccctcaagaggttcacaatctggtagcagatacagagattaattttatttattacagaaatatagcattataaactgaggtcaatgctgtggaggaaaagtccaatgtgctttgtgagcatgtccagaaggacctaatttattcttggggtttgagacrtcttcctttagaaagtggcatttgatctgagatgtaaaggatgaatatgaatgaattaggagacaggaactctttcctcttcatcactatgcactatagtcgccaactaccattgatttttgcctgtgaaatgcctgttttctatattctgttctcatcctgggccactgcaatttctgcttctactccctacaccccatttctatccattagttttcaatttctgccagagttctttcactgaacacaaatctaccacatttttttttcttttacttctggcttaaaaccatcgatagctcccttgtgcttccagagtaagatcttaacgttctggaatggcttcaaagacttttcaaattttggctctgacatttatcagtagcctcatcttctgcactcttaaccatgttgcctgtgctgtggtcactgtggactctttacagtttgctcaagtcactgtgcccttcattcaacacccttgggtttctctatccttcttttgcacttgtcagctcctcctaatcctaagaggccctatgtaaatgtcacattttccataaggcattccctcactccttatcggcatccccatgtttgcatttgtatgtttctctcatagagctcccatccatttgccttatattaacttagttgtctgtctaggacatgtgtttatctggcaccaagattatgttgtgctcatctcttccttcccagggcttgaaatacagcaggtgttcagtaaatatttgtaattgaattgtctatggatgaataaggtaagggagacaagaaatggaaactggggaactgaaacagaacagccagaccttttctgagaactggtgatctcatgtagggctcaactaagacatgtgggtggcccatgcagactaattcagtattccttcagcaatcaagtgaagtaacagatttgagtagtgctgcttgtggaggaagatgacaacagattacagtgtcctggcctccatactcagcttagcaaaatgaaagccctttgattgttggaaccaccctacatgaaagcattatattggccttgtttttagttttttcaaagcatatcatccctattctacctcaattgttttatcgaagtatttcttacaatgaaacccagttcccttcttgaagaaagttctgataaatgctgttttcttcattgtgttagttttctggggctattttagtaccctcttagattggtaccctgggcatctgttggccagtcttcctgttaatcccgttctgacaccaaggaaggaagactgggatgtgtaaagctcttatccagtattgcaccactaacctttaaagaattccttttcagtcctgcctggcttatacccaataaacaacgaaaccttttttgagtttcagaattgtcaggatgttgctgtgaggtgcacagcagactgggctcatgttctggtctgtgctcttacaaatgacaggcaaatggcagtggcctggggccaagagtgggccactactctccaagcttgacaagactgctatgtacctgggccactttgcatgtccagtgcccatccacgcagtcctctcctgaccaaggctgcgaagaatgtttaatgatacaagagtggtggaagtatggggagactttcggcccagacagtccacttatggccttcacttgagtgtgctgaggaaggagaatattttgataacaaccaaagatggatgctagcccatccacctttttgccaatttgactttgttccttgggatggcaacttactgatgctgatgtccactaaaaatgcagcagaaaattagtagttgctaagagataggaaggtagagtaggagaaagatgagttttgcttctagagtactgagtactcactctgtgcaaagcactgtgtagatgctggaggaacaaaggggaatatgatatggtatttattgtggaggaagtattatttttacctgttgagttgtttaaatccttttttacttctaagggatagtagaggtaacaatttgggattggtcatttggaaaattcagatttatgtcctgagtcaactaatctttcattagaactttggccaactactttaaccctatgtgttttataaaatacattatgaactgttttgtaaaatgctttcaaatatattatctcatttgaatttcatacaggcctaggatcattattttattttaataatgagaatcatgaaacccaaagggttaagtgtcttattccagttctcccagcttctcaaagacagaatcctcygtcaccactggtctcctggttcttttcgtctgtactcaacaacctccctgcctagaagagttatcgtaaatgcagatttttatatagcctcagcttttatgtatttcaaactcactttgaccctacacagccttctctttagctcttgtgtattgagtgttaaatgtgtgtggcatgctcctgtgttcgtgtgcctcttatccttcttcctaacctagagcttctttattttgtccaaaatttttatttttttgagagggcctgggggaacatttatctttttccagtcttatagttttccatttccccaatttctgtgaacaatgataatggtaagtaactaatgatcaaatgatttctttatgtttaccctgttaggaggtgtaccggaattcagaattgctgaatctttggggaaattgtaagaatgtggatttgggaattttgtacaagttaaacgaagcactgagatcttagtatagggaaatcttttcrgcactgagcagaggactcataaktaacacaacacgtggagttgtatggtcaaggaaatggcagaaacaggttctttttgcaaaggaagttttccctggacattcttaggtagcagwcgtttctttttcttggacctcctatagcatttattcagaccttttttatgacttgcattacttcttgtastatattttagtacttttattgttatcatctctcttactagactctggtctttttgaggacaggaatgttttcagatttactttgccaactctgtggcacctctagcacacagcctagaatgtagtggttaacaaatacacattttctggaatttmtagagacttatactttctccttgatgtgatactatctcatttgaatattttacagtaagcaggtattaccatgcaatcaggagaaaaagtgaagatataaatttcttttgaatgattaaatggataagtgaatgattaagaattcagtgctgctagggaaattcagaaacaaggtatcatttactgaacatttaagcactggttttccaagaagtgtaacatttttcatacttattaccctaagtactttttcagcatcttgatgaaattggatggacataggtgtatagtagctgaaatagtcaatgttcaagattttcacctcctgattcaattcagtttctctaagcttcgaagatcttgctttgaatttgtattttgttcaggtgttcccaagtgattttaaggcagcagagaggttattaaccaaattgatccctggggtgtgaaaaagtgaattcagcatctctcctgggctccatctccagagtggagccatttcatcaggagagtctggttcattcattcctgagttcaaccatgttccaactattcatccatttacagtcctccatccctgtgcaatctgtcaccaagcagttgcacactctccttatttcaggttgcacagaaccagagcaaaaaccagacgggataaaaattatgcatgtatttagatgccacaaattgctttctcattttctcatgtcgacaattaggatgatttcaaccttatgtcatatggactgaatgtctctgtgtttgtgtcttacattgggactggcatgctgttgatgaacacatgaaacatttctagaaaatacaaagtaggcaatgctttccaagttaatactttgattgtgggatgtcatagtctttttggactcaaggacattgtttatttacaattattgaggcctttgagactttgagggagctgcacatcagcttgtatggcgtgacatatacaattcagtaatgccttgcttgccctccttacgttgcaccttagaatttatgtaggtcacagttactggagcttggcatttttcctaagtaagaacatatttcacgtaggaagcatgtatagggtccaggcttatgtatgccagtgaaccttttgaacaactttcgagttgagcattggagaggaagaaaaacaggtagtagataaccttgaatcttccagaatgaacattgagaattaagaaaaaaaaaaacaaccttgttttttcacaagataagtgtttcccttttgagagcctgctgtatttattattcttttcaatcttaaagctttagtttaaatcccagtagtaacagagtttgaaatcaacgaactagagaggtctcaaatgatggctgctgcttttgggggataatcatttctttggcacacaaagagaacaccaaactaggacgggcccacatataacccctgtggatgggacatcatcatgaagactgtgtagctgacggaagcgcatttcagctctgaaaatgttgtcgcctatattgtaattgcaggttagattaaaaaaaattagggaagaatgctaagctatattgaatccctattatcttctaagttatataatttgaccctgctgacatgttttaagagatacttttatatttcatttgtaattgaagaaatagaggatcggggatgttaagtaatatgcctggtcctacaataagtcatcaaagttgtaggtttttcatttattccctggccttgcactgtattctgtgaatcttatatttaacaaacaggtcctatgtggtctttatgttttcagctggagtttatctctttcttttttcattattgtttatgttgtccttgcactaaataactttgtttactgatttttctcttcagatccctaatatctggcattgtaccttgtctgtagaaagtgttcaataaatacttgcaaaagagaatttgaaatctagtgtattgtcacacagacttggttctattttttacccgtttaatactttcgttttaacaaagcctcttttaaaatcaacaaaccataaatatttaaaataccttctatgtgtagatgtgtagagcaaagtaggaaatacaaagttcttcttcttctttttttttcagacagagtcttgctctgttgcccagactggagtgcagtggcatgatctcgactcactgcagtctccgcctcctggtttcaagtgattctcctgtctcagcctcctgagtatctgggattacaggccacaccctgtaatacaaaaaaaaatwttttttgtatctttagtagagatggggtttcaccatattggtcaggctggtctcgaactcctgacctcaggtgatctacccacctcggcctcccaaagtgctgggattacaggtgtgagccatcacacctggccaagttactcttaagaggaaagcttaatatttaactgtgagagatgaaaactgtcagggggggtttgttttctgcttctatttttaggtgatcaatcctttgcctattttaattatttcaagcacatcttcttggcattttatttgccaattaacatttgattttctctgctgtttaagaattggagatcttatctcacctgtatcgatcttttatataaaattcctcctgtgagtttgtgtcatgccaaacaactgagtggcagaacaaactgcatagccatggcagtgtctagtcttacatccagcatccaaccatgcctcatcacctccaccactatggcttgggcccaagctactgtcacctgtcacttggattattgtggcaggctcataaggggtctttcttcacatcttttggttgattctcagtaccgaagtcaaatgattctgttacagcgtaagttggggagagatccctccttggttcacaacctgctcacttgccttggagaagagatggcaactatgatggtggcttacaaggccctgcatcatctgccaccgcgcttgtggttctctgacctcccttcctcctgcttttttcttggtcattccactccaggctctctacttttcttctagccttttagggttgctctgcccttcatttccctcagccctatgtgctttacttccaggaacttgtacagtagggcttgctctctcatcttcttggggtttttacaagatttccatgaggcccacaccattcaagttggaacctcctccaccacccaccctggtactctccccacgctccttccgggctttgttttctctacagcacctatcaccagctaacatgctaaatactttactagtttattttgttttattgttgatatggttcggctctgtgttcccacctaaatctgatcttgaattgtaatccttataatccccatgtgttgagggagataccagttgggaggggattggatcatgggagtggttcccccatgccattttcctgatagggagtgagttctcacaagatctgatggttttataaggcagttttccctgcccttacctgctctctctagcctgccaccatgtaagatgtgcctcttccccttccgccatgactgtaattttcctgaggcctccccaaccatgtggaactgtgagtcaattaaacctcttttctttataaattacccagtgtcaggcatttatttatagcagtatgaaaatggactaatacaattgtctttctctctcaactacaaagaagaccccaaaggcatgaagacaagttttttttttacttttgttttctgtcttgtttcctattgggccctgctgcctaggatggtgtctggctcaagtagatgcctgataaatatttgactgaaaatgagtgaaaatatagctgtcagactcatagatgccatagataccaaccagaagctgcagtatgaagtcaagtggctggggctttggaccacagaggtcccaacccagccccagctccacactgttgaagacaagacttagctaagcactggatcttggtcacttacttaataccctgagcagcaactcaccatcctgttacctatctataaaattggataggtaatacctacttcacagtgtatatggactggagaagattctatatgtcaagggcatactataatgattgatactccagaaatattcaatattgatactgtcatttaaaaaaatttccttgaatgattactcctcctcccatccttttcctgtttccccatctgactacctgagaaaattctaactgctccatcattgtcccacttagactctgatgtaaaaggggacacttgagcacatagttttagacagtttaaacctaattgtttcattgtttacatcttgaagaaaagacagttgtttgccagatgattttcataaaactttgcaatgtaatacccagttttaagccatctattaagaattgagtgatttgatttgcaaagtttctgggacatttacttctagagagttcctgctacctgcctggaaattttcagatcatccatcaggttatttatgaactttttatggagaacaattaggtatttataagaaaaattgagttaaaaacaaaacaaagaactttttcttgatccttccttttgctttgctattgactaaaatgatttcaaatatctattctatcataagttttcaagtatgcatatgcctaacataaggtagttttagcttccttctcttgtggtaaaaatattttgattcaataggtaaaacacaaacttgttcatgtactcaaatgtattaattttttgctttgtgtttagtaaaaaagtgccagttgaaataatccttaaatacaagtgatttcttgttcctgcgtgtaaaccattcttccgtgaatcatttttttcagttttttgatgattctaagggaaaaacctttcttttgtactacattaacctcacactgtatttacattaaataatattctttggagaaaaaatgatttggtatacttagtgaattatgtaacctcctagaggcactgcagactgttaatgctcagtggaacccagcagttgtaactgatgaaacatcagcatggaggctataaaataaaaaagaagtaattggggacatgttgggagctggcaaatggaaaacactagcagatgtagccctgaaaagaggagagaaagtttaaaaaatcacatttactagaagagtaactgcacagatggatgatcgaagttaacatttcattcagttagaaaagggattagagattatatttccatttctagtacttaaaagaagtaatacttaaactctcacaatgaaccatataaaaattactttacagcaaccatatatatcgcgaaagagtatttgtccatgaggttttcatctcttggaaacatagtatagacatttttggagctagcttgtacttatttttaagagctgattataagcttctcttcccaactccctaatcagtgatatcatgttggtagcctgaaaccagccaccatgagaatatgtattaatatttacaccatgaaaactgacaaacactacaattagaacacccccatcccaccaccagccgttgttaagcatttaccaccacacaggcagatatgtgcattaactgccctccgttaatggaggatgatggagaatgagcagagttcgggcattcaaagaaagcctctctgcctggttggtgtgatggaagtcctacaccacagagagttttggctatttcttaatacygaactcatgcataggcaatcatacactcatgatacatatgcaagaatcatgccaattggttttaaaatataaaattctgattctaaaacacgttttgctctaatagccgtcctcaacccagacttgttatgtctgtgtgccatgttgcctatcgtacaggaaaaaatacaattctttctcttcagtggtaatgatactattttctatcccctgccttcataacttttgctttcagttcatatatttctccatgctcccaatagtgaacctgacaagaatgggctgatggctcaagaagagactagatgcttttgatactatgttattcacataccttttcttttcctgggctcaagagtatccatgttgtacgtatttgtaagagctgattataagcttctcttcccaactcccttttcagtgatatcatgttggtatcttgaagccagccatggtgagagtatgtatttacaccatgaaaattggcaaacactacaattagaacacccccaccacccagttgctgaacatttattactacactaagggagtaaatgttgccattaasagagcaagcataatgtgggggatagaacaagaagaagtaggttaaagagaccctactgcatgcctacctttgatttctgcttcttctaatgtattttggtcatcttaataatttttatgttaacatcttatcacttaatacaatttttgaaaaaatgccacctttttttgttcttctcctttttttttattatactttaagctctgggatacatgtgcagaatgtgcaggtttgttacataggtatacawgtgccatggtggtttgctgcacccatcaacctgtcatctacattaggtatttctcctaatgctatccttaccctagcgccccagccactgaaaggccccagtgtgtgatgttcccctccctgtgtccatgtgttctcattgttcaattcccacttatgagtgaaaatttgcagtgtttggttttctgttcctgtgttagtttgctgagaatgatggtttttagcttcatccatgtccctgcaaaggacataaactcatccttttttatggctgcatcgtattccatggtgtatatgtgccacattttctttatccagtctatcattaatgggcgtttgggttggttccaagtcttgctattgtgaacagctgcaatgaacatacatgtgcatatgtctttatagtagaatgatttataatcctttgggtatatacccagtaatgggattgctgggtcagatggtatttctggttctagatccttgaggaatcgccacactgtcttccacaatggttgaactaatttacactcccacgaacagtgtaaaagcattcctatttctccacatcctctccagcatttgttgtttcctgactttttaatgatagccattctaactggtgtgagatggtatctcattgtggttttggtttgcatttttctaatgacgagtgatgatgaggttttttttcatatgtttgttgtccacataaatgtcttcttttgagaagtgactgttcatatccttcgcccactttttgatggggttgttttcttcttgtaaatttgtttaagttctttgtagattctggatattagcccattgtcagatggatagattgcaaaaactttctcccattctgtaggttgcctgttcactctgatcgtagtttcttttgctgtgcagaagctctttagtttaattggatcccaattgtcaattttggcttttgttgccattgcttttagtgttttagtcatgaagtctttgcccatgtttatgtcctgaatggtattgcctaggttttcttctagggtttctatggttttaggtctaacatttaagtctgtaatccatcttgagttaatttttgtataaggtgtaaggaaggggtccagtttcagtttgctgcatatggctagccagtttttccaacaccatttattaaatagagaatcctttccccattgcttgtttttgtcagggttgtcaaagatctgatggttgtagatgtgtggtattatttctgagggctctgttctgttccattggtctatatctctgttttggtaccagtaccatgctgttttggttactgtagccttgtagtatagtttgaagtcaggtagcgtgatgcctccagctttgttcttttggcttaggattgtcttggtcagtgtcatagttagcttttcttgttgcatcgatccctttaccattatgtaatgcccttctttgtcttttttaatctttgttggtttaaagtctgttttatcagagactaggattgcaacccctgcttttttttgctttccatttgcttggtaaatattcctccatacgtttattttgagcctatgtgtctctttgcatgtgagatgggtctcacacctctgagtcttaactgtttttccaatttgccagtctgtgtcttttaattgtggcatttagcctgtttacagttaagtttaatattgttgtgtgtgaatttgatcctgtctttatgatgcaagctggttattttgcccgttagttgatgcggattcttcatagtgtcaatggtctttacaatttggtatgtttttgcagtagctcctggtaacagtttttcctttccatatttagtgcttccttcaggagctcttgtaaggtaggcctggtggtgacaacatttctcagcatttgcttgtccataaaggattttatttctcctgtgcttatgaaacatagtttggctggatatgaaattctgggtagaaaattctttaagaatgttaaatgttggcccccattctcttctggcttgtagggtttctgcagaragatctgctgttggtctgatgggcttccctttgtggataacccgacctttctctctgactgcccttaacatttttctttcatttcaactttggtgaatctgacgattatgtgtcttgggtttgctcttctcgaggaatatatttgtggcgttctctgtatttcctgaatttgaatgttgrcctgccttgctaggttgaggaagttctcctggataatatcctgaagagtgtttttcaacttggttccattctcctgtcactttcaggtacaccaatcagttgtaggtttggtcttttcacatagttccatattccttggaggctttgttcctcccttttcattcttttttctctaatcttgtcttcacactttatttcattaagttgatcttcaatctctgataccctttcttctgcttgattgatttgactatgatacttgtgtatgctttacgaagttctcatgctgtgtttttcagctccatcaggtcatttatgtttttctctaaactggttattctagttagcaattcctctaaccttttttcaagtttcttagcttccttgcattggattagaacatgctcctttagctcagaggagtttgtcattacccaccttctgaagcctacttctgtcaattcgtcaaactcattcttggtccagttttgttcccttgctggggaggagttgtgatcctttggaggagaagagacattctggtttttggattttttagcctgcaaaagtgccacctttgaagactgaagcttggggacctaccagtggttggttggggatttctaaaggcatttctgtaaacgagaaaagtcttctgacactttaggtagggttagcttgctgagactgccaagggatgatgtacactccaacctgtgatttctgatttgttcttgaatgaaaattgttctgtaaccttttgaggttaagactcagtattcaaatataatgtttgcttcattgaaaagcttggcatatagattgcctttctgtagtgaccatctaatataaaaagatttctggaacatacatgcccaagacatgtctaaatatagtagctaatgtttattgaatgtttgttatataagtgacaacatgctaagagttttacagagtcacccatagtgatcttatataatccttatcatagtccttagtcctttggatttgttaccactctattaaccctatatctagatggtgaacttagccttagtgtataaagtaacatgccctggttcactagtgacagtgaagaattgaacccaggtcattcaagttttgagctcatgctctcagctgctatatttaattatctcttgtaactcagaggttgtgttaatcaaggttatccagagaaaaagaatcaataaaaagagatttattatgaggaattaactcatttgattatggagrtggagaagtcccatgatctgccgtctgcaagctggagattcagaaaagctggcggtatagtctcagcctgagtctgaagggctgaaaaccaggagacctgatgatgtgagttctagttaaagtctgaaagcctgaaaaccagagaactgaaggtgtaagtcccagcccaagggcgggagaaggctgatgtccctgctccataagagagagcaaattcacccttcctctgccttttgttttatttgcgccctcagtggattggatgatggccacatgcatttgtgaggacagttatctttactcaatctactgaggttcaaatactaatctcttccaaaaacaccctcacagggtgtttcacagacacacccagaagcaatgttttaccagctacctgggaatctcttagctcagtcaagttgacagtaaaattaactataacaggctgggcacggtggcttgtgcctgtaatcccagcactttgggagactaatgtgggcagatcacttgaggttaggagttcaagacaagcctggccaacatgttgaaaccccgtctctactaaaaatacaaaaaaaattagctgggcatggtggctgtaatcccagctgctcaggaggctgaagcagggaatcgcttgaccctgggaggtggaggttgcagtgagctgagatcacaccagtgcactccagcctgggcgacagagctagactccatctcgaaaaaaaaaaaattactatcacagtatctatgaagctaagctcttatgaatgacctggctgaagtgaggagagcccactgtgagggaaggctattgtaggatcactgcagtgcagattagtaaattgcagccatcaattgattaaatataaaaacaggtgtatgcttggggatggtgacttcagtgacctctaaggggctataccactcttccgtgcaaaactgaaatgatggtgcccagtaaaatgtcttccctgatcatcattcaccttctgttggcttgtttcacaaatagtgaaatttgatctccctcaatgccatgatgggtccagtgggactaggatcaaagttataaataacagggataagtcctgcttgcaaatgggatatcagagacgatcatgataatgctaattaatattaataaataaataactttatggagaacttaccatgtgtgagataaagttccttctactttacattcaattcttacaacaacactccagtaggtacaatgagccctatttcacaaataagggaactgacacactgacaatctaagttacatgctcaaagttacaaagtggaaagtgatgaagttgagggttgagcccaggtaatctggagccagggcccacatctgtaaccctacaggtgtggaatgaggtccaggtgctatgaaaaatgatgtctttgaaatggaaatacaaaccagtttgtatgccagaaacttttccctcttggctttaattctggatagagggtaacttgtagatgatctaagtttaaattctagaccccagtgttaggattgtctttcghtacagctccaaaaagatcctccagtgaacatgggtccttcttgctctgctcacatctcagactgcgggtagtgtccactgaggccaactactctgggaatcttcaggaaatagagataaccaggggaaaatgaacagtaattacctggcattaagttgagaccttttgtgtgaaaggcacgtgaagayaggcctttcagcgacttaatgagccttatcacgggccttcagcttttctgaataaatttggaggtaataaaatgttggaccttgctttcaaaccaaattatactacaacattattttgaaagacctttggaacaagtgactgaaagtgttttttcccctccttcctgaagatagaatcagtttctccttattaatgagaacccagagtaatttcagaagacaatgagtaaataaaagtatttaataaaatgaaatagaatctgatttgtataaatgaactcaaaagartgccccatcctgtttgccactcgcagctttgttcattcgttcggtaaatatattatagtatcttctcactatgggccagacactgagctaggcactggtaatgacaaagggaacataggcaattagcaagtggaaaactaaagagaaaataattagagcctttttaaagtgctaggaagaaaataatgggagctgtattggggagtaatgatctactctagctaggtccaagacacaagctcaggggagatgacattgcactgaggccacctcaaaaccactcgtcagataaaaattagcaatcagtaaatgtatatgtttatagaagagtaagtatcgcttttagtggtgatgcatttaatctttttgtatagttctgcccctgtttgcattcctttgtccttttatagcctctctttggcatctagggccatccagagcctttttattacaaaacatacagacactgttttcagactgtgtacttactcttccaaatcaatttctggcaccgtatctcatggctcatttgctacaaaagtaaggtgattttagttaacataggaagaatttcaggacaggaatatgccccattttctattccgtggtacatttgattgagtaaactgaatttaaacagaaggcacctgcccggcaagcaaggtgacctctcttgggtgaattaaatcatgtctcatgttgcttaaaagatgtgactctagagaaaggttgagagggacagaagtcattgcacagtttactcttccattttctatttgtattaatcttttaagataatacaacagaatccttaactaaataaaattattggaaggccttaataaaattattggaagctttctttaaagttggctcattatattttytgtactgtaaactagttggtaaatgtaatttcattataattttgtttaatgactgggttgatattatgattcatcactcatttacttaattagtaacacttgactttatgtaccaaaaatgttcaatttgcacactgatatttttcagttaaataaaattatgtttggggaagatgaagctttttttctatttttgaagcatgcttttcagtattgttcttgattatcaccaaatataagccatcagcaagagtagtaagatgagtttgctgctaatatgtagcagagaggacaatagtagtttggcttggactagaactgtctggcttcaaattatggtgctttgaaagatactttaactttctgtgtttgtatcctcatctttatctttaaattgatacctctctcatactatgtaccatagtaactrcctctmgtgtgagagaatgaatttaaaatccacttagtgtgattttaatattaatgttattattaccacttattttagaatttgtaggaacgaagagtgatttttagaggtcatgactctagtcttctgctctaaggaaaaacttccctagtccatttctgattaatttcatggttctcaacttagttaatgagttcaaccctgcatgcaaagctgtggacaagggcattcccaaagtcacaggctaataatggaggcacatttgtggcacatcatttttgcttcagtatttgggagaattaaaagtgtgtgtacgtattaaaagcagcataatgatattatgcagtaacatgcaaaatttgcatgaatttttaaagtactagacgaggctttaaaaatcatttacatttacagagggaaacttaagatggcaccaccaagacccgaggatcatttgcttttgtcattctagagacttaactggaaatgtctgagaaatactagagaaactgatgggctagttacctgttgtaaatgttgtttctgtaagaaaattccaggattttcctcagccgtcccttttatcttctagcatttttaggtagtgagggtggaggagttaatgatattatgtaagccatctggtgcagctaataaaattctaaggtgactgcaagttggtttgaggttcagagtcatctggctgtttgggagacggtctcagtcctggcttgtggaatgccactattgcttcattcttgcatctctcatatgaacagcgtgtcacctttttcttttttcaatactcttcttcccaggccctatactttcctacaagctgcaatggccagccggagtgtttctctgaaccttatgcacaactgtatacrtgcagttgtctcatcatatcctctcaactgtctcaaggtatctttaagaataaaattaataaatggcacttccatccttttatttccacactccacaaatctcagagtcattctggctacctgccacaccctcaggacttcccttccctgtcatccattttatcagcagcttatttctattttatctgctgaatatatctggcatttgttcattttccttccttcctgctgtcacccctccttgcctatctcccatcatttcctccccttcctcccactggacagttgggctctacctattgctccagcctccttgtgcttggcctttactcttggcgctcctgcctcttatcaggctttcagatccattctatgccaggctctctctagacacagtgatacctccttcacatggtgaactcttagccctcctctgggcttttggcattttctcttccagtccaaggatggttatcttgcttttcacttatttccaattataattatccactgattatacamaatggcaccatttaattattgtctctttctttcactaggctgtggattccataaaatcaagtcttctttttcacagttatagccccaacacctagaacaacagttatttctgactaaatgaacagatgatttaccatattatctgttccggatggaaagggaagtaaaatattagcatatcctccactagtctactggactgaatttctgttcttaagtggaaaaagcatcttttggccctgatgtcaagctcaaagttgcttggatcaaatgatgttgggtattgagtggcaagctaaggagtttaaactttgtactggaagcattggggagctactgtaggtgggaagcccccagcttaatggtctcaaaccttcacttccctggcaggataaaggtaaatgtgtgttgcatactttgccaagaccaggaagtccaccgggtccttgagagagggagggactgctcrgggatgggaacacgtaaaaaaaaattcactcactacaattgcattaacaggacagggtcaaaggtcatatttccaggttccatggccaacgctaggttctttttactcacagctgactaaataataattaggaggaagctgatgaaaataagcaccaatgattgtttttttttcccstctgtgccagattctatgccaagcacttatgtgaagtagatagtattactaatcctattttatgcatgaagaaagaggttgaggttacataacttggtggaggccctacaagaactaagtggctcaattcaggtctgactaatcctaaagcttgggcttctggctgccaataaatcacagtaggacaaatgttaataagacaaaatgttattaataatagcatcttttttatatgctagacaacagctcagggatgcacatttgttttctccttttgctcctaagagccaggtaagaaaacactagttgctaggttcctcagaggactgagaattctgtagctccactggccaacatcccttgggtcctaaatgttcagttataataataataaactggaaacaatataaatagagaatggaaagggaccctgaggaaagattgggcatgatttcattgtactcctaaaacttttctcatatgcttttgtgcccagtagtgtttattctgtaatgagtccttaatatacctcaatagtcatagagaaaccccttttgctctctagtggctgtatgggaccgtggtaataatagttgctcttgtttatttcctgtttgatgtgttttgatgcaacagactattcagctcagacagagaccgtgtgctgcaggtgaggaacacaggctttggagtctgaattcaaatgcaacttctactgcttacagcgatagcaacccagggatgtttcttcgacttgcttccttcatttattcctcaaatgtttatcgagcatccgctgtatwtcatgtgttatgttagaggctggggttacaatgggggcaaagatagacatggtcctggctctagtgactcttacagttcaattcaagagagatgtcaaataaacaaatgagtttgtggtaagcttaatgacagagaggtacctagaacatagaactaggaaataacccaggtgtggggggctttctaaggtaacctaactaagagttaggaacaaagctctcagcatggtgcttagcacatactaagtaaatgatagttactacatggtaaattttcccagagaaagaaccatagacacaactttatttagtggaaagtgactaatatggttgacttttgtcagtatttggattttatattgtataatataactctatgatcttgtttatttatttttcctagaaagaaatgaagtcaaaatagttgcttggaagaattgttcaaagatgccagacatggtggctcatacctataattccagcactttgggatgcccaggtggcaagatcacttgagcccaggagtttgagagcagcctgggcaacacagtgagaccccatctctacaaaaattaaaaataaaaacattagtcagtcttggtggtgcacgcctgtagtcccagttacttggggtgctgagatgggaggatctcttgagcttgggaagtcaaggcagcagtaagccatgatcataccactgcactccagcccagataagagagaaagactctgtctcaaacaaacaaacaaacaaataaacacacacagtgttcaaagataggccatgaatgaagacatctaaacacagccatcttgttccatagttagttccaagataaagtcaaacagaaacaactagaagccttggakgcactgtttgtttggtaaattttgattcatggtctcattaatgcctcatcagcctcttgaccgttagtctgttcaggtagctctgtgtggggatcttcattctctggtagccaagataggattgtcctaatgatgactggttttagtgtctccataaccactggtccctgaatataaagcgctatgcatagctaaacaaattcttattgcyttcagcctgtgtgcaatttagcagcaagatatttcatatctcacagcattcactagtcctactcaattaggaactgcttgcaaatcagaacagctgatgatcataatgactcaagtggacatgtttgccctgaaaaggaaaagaaaatattgaaaagacatttcaattgtcattgaataactcagaaagggaccagggtgttgtcaggggaaatatattgtcattggccttcctgactgcggaacttccctataggttatgacaatacagctgggacacaccagaagggccaatgtgagaaataagaacttgaaactggggccgcctgtctttctgggggtggtctcctgtcccatttttagttatacccatattcccaggcacagattttcattttagaaaaaaaaaaaaaaattaaggcagtggtgatagagtgctaaagcagctttttattgaacaaaaataaaagcacccgaattattccgcataccttcagtgataagcttacatgaatgtactgcataatatatactgcttaagggcayggactttgaagtcagacagtgaaattttggccccgccacctcctagctgttaacttgaagcaagttacttaactgctctgagtctgtgtttcctgatctataaaaaggggtatctgtggttacctcaaaggctgttgaaaaactgaatgtgcccatgcctgcaaagcaccacgcatagaggctggcaagtactgagtgctaagtaactgttgactgatttgtgagttcagttttgactcagtttctgacttctgctggctagaacttataactacattaagacacccacctggttaaaaaggtagaagactcaaattatatacgtgcacatacgtacatatgtatctgcttaggatatagtaagacctcaatcaatattagtttctttccagttccagtcatgttggtattaaattagtatgacaaccaaggctgaactgggcaaatgtgaaatagatctatcacagtaattattatcatttgtattactttagaatttaaaaagctctttcaacatgcattgctttagtaagtccttacaacagctggggaggtgtggaagtgtttttttatttgtccatatattctttcctccacgcagcaaatgcacgtgagtgcctgtgatgtgtcaggtactctgctcatcctgggaaaccaaatagatgtcctcacagccctgtcttggtgatcctccaaatgtatgtcctaagataccaaaaggtggtatagacaaggtagttatttccagtgattaatgttttatagatgaaaaaaaatgagattcagtgtggcttgtaagtgacagagccagatctcaagctccaaatcccaagtcttttccactggatcccatgcctgcctgcctgaatgtatcatttggaataaatgctagagagagcctggtgtagccattcattttacagattaaaggcaccgaggcttaaagtgggtaaatgatatgctcaagaccatctctgctttaggggtagctatcagttccaatgaggaaaccttttgacagcatgctaaatcttagaatgtatatagcttattctgcactaatgtaatagctgcattttaataaattgtgtgttatcaaaaattcagtataaaatgtttgtttcgggggccatagttaaggggcgctggagagtttcagactgaaaaatcaaagttacttgttttcctagcaagaacttaagaaataggaatattgttttatagcggtaaaacctaaatgccactgagcaaatccagcacttgataaaatctagctttttttcaagagtaaagaactttcactttctatcacaccagcactatcattatgtgtttagacctttgtcacccagttacaggagacagagctcaaagcactcaaacaaagcagctgtattttgtagatgcagagccttcttccttctgtggtgtggtgctagttctcagtgayggatgagtttttagtaaagagttggtcagcctgctctgggccagatcctattctaggcagaagaatgagtagaacagaccatgcccctatgcaaatggagcttattttctattggaagacagatagtgacgaaaagaaggaaaaaaggaatggagggaggaaaggaaggaaggatattgggttagaaagtgataaatgccatgaggaattatcaaacaaggtaaggagaattagagggagagggtggaggtgggggctggcttgtgtgctgccttagatcaagtgatctagcagggcctctcatggccacattgaagatgtgactggagtaaggaagaagccatatggcaccttggagtaaaagtctcccaggcaaaggcagcagcaagggaaaaggtcttgggatggaaacatagcaggcctgtttgaggaaagcatggaggcctgtgggctggaaggaagagtacaaagcagggcaagagaaaagcggcctgagagacagttgggaacaagagcgtgagggaccttgtgggactttactctgggtgagataggaaggtactagaggtttttggccagaggagggatgttacctgacttaggttttagcaggctcctaagtagagatagacagtccaggatcacaggcagaagctgagactgttggggaattattgtagcccttcttgccaagacttggtggtggcttgattttggaggtcagggtagagctggcaagaaatggttggattatcatggatggtatggttggatggcaagaagtggctgttaatcttttgaaggttgtcctaaaaggatttggtggtggactccaaggtgtttggcctgaacaactagaagaagagagccactatttttgagcactttatttgtgggctcaggtatgtgtttgtgtgaaagactaaggtacactaatggaggtggttccttcaagtgasagtgtgtagaaatgccttatgacattgcttatgacattgtagaaattcctaatgacactgttgtgctgaacacctatcaacttcagtggggatggcaccaggttcaagaggctgaagaagagacccagagacaggaaacgtgacatgggcttttactgggggcttacatacaggggagagagtccagtggcagtgggctggacaggagaaccaggcaacttgcaaaaaacatgcagtttatatggcatatttacttagcactctccctgtgacagtctctacctggcaaccttcacttaaccccaaacaaagggccttgattccctatacagccatgttccattggacaggccaggggctcagatgttccttatagattaggaacaactctctgggttggccattcttggattcttagcttgggacacctaaccacattcaagtgcatctgccatacagggttattcttagggtatgcttaagttattgctatcaggtgtgtttgccatacacacatgttcagatacaaatgtgggtgggattataaaacctgtccttttcttcatacatgccttctgcccctcccctctatacasttaacagcatttcttcttagccattccctacctccaataaaatgttcacttggaagaagaccagtcatttaggacttagtgtgattttaagtcagtatgatacctttgctagatatatttacatttaaacctaactttgcactctatgatggcacatagatttagtcttttaggctaactttaatcactaaagttgcttgcccagagaactgtgctgaaaaagtttgtgaagctggttctgggctcagcaggaaagaggaaaccttaatcatatctgccattatagggactgagagtggcatatcatatgtgcatagtatttgatagcctagctatggctgccacacccacacaaaatactttttgtcctatcctttccctcttggaggaagttttggcaatagcaaatagaggaaatattttccttttttactttcttgaggcccrcttgccttgtgacacagggagaccactggcccaaagatcagactgtaatatctaaaggccttgatgaattatgtgatacaaaactcaagtgctctaggagatasgtcctttaccttaatgggtaatgcctttgccaggtcataggctattttttctctagcattcatcactgccaaacatactgtaattaacattsatttattatgtgtactgtttctctgcttcaccagaatgtgagccacagggcaaagactttgctctgtgttgttcagtgctatttccccagtgcccaaacagtggctctaggaagtaagtgytgagtgaatgttgaatgaataataataatagtaagttgcagcctasagttaggataaatgattacttaaggtagcagcacttttttttgaaagcagaaagctcctgttgtaacaaaaatcactgtagctgtatgggttagtgaacattattaataattagagtgataatgaagatgataataataagagatttctcaaaagaagagatatgaatggccaagtatatgaaaaaaatgcttaatatccctaattatcaggggactataaattcaagtcacaataaaatgtcacctcacacttgttagaatggtttgttagatcaagtttagcctaagctgcctccttacatattttaagttcagcctaaaggtttttccgtacatcgtgaactataacaagcggaggtataaacaaaccatagcctacccttgtgccaatcactgacttttggccaatcaaatgtagccaactgtttgaactctgttcaaataaggcaagcgcccagctgcaaccaatccagctgtttctgtattttacttccattttctgtacatcactttcctttttctgtccataaatcttcttctaccacgcagctgcactggagtctctgagcctgctctggctcagaaggctgcccgattcacaaactgttcattgctcaattaaactcctttaaatttaatttggctgaagtttttctttatcaggctattatcagaaagacaaaagataataagtgttgctgagctgtagagaaaaagcaacccatgtacactgttggtgagaatgtacattagtacagccattatagaaaacagtatgaacttcctcaaaaaattagaaccaccatatgattccagaatcccactagtgtgtagttatccaaaggaaataaaataagtcttctaaggatatctgcactcccatgtttattgtagcattattcataatagctaagattcagaatcaacctaagtgtccatcaatatatgatggataaagaaaatgtgatatacatacaccctggaaaattattcagccttaataaaagaagggaatcctgttattggagacaaactggtgaaactggaggacattatactaagtgaaataagccaggcacagaaagacaaatactgcatgatctcacttacatgcgaaattttaaacagtcaaactcatagaggcagagaataaaatggtggttaccaggagttggcgcggagggtgggcagttggagaattgttggtcaaaggatacaaaatttcagttatgggaggaatgaattaaagagatctattgtacaacataatgactatggttaataaccatgtattattttcttgaaaagcactacagaataaattttaagtgttctcactataaaaaatgatgtgatgggccaggcatggtggttcatgcctgtaatcccagcactttgggaggccgaggtgggcagatcacaaggtcaggagtttgagaccagcctgtccgatatgatgaaaccctatctctactaaaaatacaaaaattagccaggcgtggtggctcatgccggtagtcccagctattcagaaggctgaggcagaagaatcacttggacccaggaggtggaggttgcagtgagctgacatgcgccacttcactccagcctgggcgacagagcgagactccatctcaaaaaacaaacaaacaaacaaacaaaaagatgtgatgaatgcatatgttaattcactcaatgtagccatttaacaatgcatacatattttaaaatatgttgtacctgataaatatatacaatttttatttgtctattaaaaaattaattaattaaaaaagccaagctcatagaagcagagagtagaatgatggttgttgccaagggctgggaggaggtgggggaatagggagatgctggtaaaacatacagttttaattagagcggaggaagttctggagatctattttatagcatggtaactacagttaataataataatgcattgtacacttgaaattgctaagagaatagatcttaagtgttctcaccacacacacaaatcataactgggcagtaatggacatgataattaatttgattgtggcaatcatttcacaatgtatacatatattaaaacaaacaaacaaaataataataattgtaatagctctttaaagcccttatatgtgcctgaccctcaactaagtgcctgatgctcattatctcccttgtgaagtaggtccttgtttgtcaagtgtagaaattcaggctctcagtgacttgtccaaggatacaatgctaataatcagggggttccaaagctgaaaagaaaacattaagacctctctatacaggaggcttggccttttatctgctaagttggatcattctctttagagccatttaaaaccattggaaaaagaaagaacttctgggcaaatgagaggtttggctgccttttaccattgtaaaaatgcaacagttgctggaggctgaaagcgtctttgaattgattcatttgttttgtttattctgcaattctccagtaggaaagaaccagaccttttctgcacaaataacttttcccaaattatgttgataggctggttgtgaaggatcccaagtgagtataagggtaaagaagaaaggagaatctaaaaaccttcacacccaaatccaggcttttgaggaaaaataggtggttgggatgggaagagctggggttcagggagagttgatcccagacttttttgctttgggccaaatatgcagaccactttttttttattattattattttaatttaaaaaagtcactcacttttatttacttatattcacatatcaaacagaatttgcagactctcaccatgaatgtaagagcagcattactgaccataaatagaaagtaataatagacttagtgaaaataaagcaatgccatttcctgttttaaaattaaaacaatacaagtaccccagagttacagcacacagtccatgagttggaagctgagtgttggccccctaaaattttccagaaacgaagccagtggggcaaatccatcttgtaccacaatgaaaccctcaaggtcatcaaagaggttaaaagaaaaaaaaagcatccaaaggtcagcaacctcaaagattaaaggtagataagcccacaaagatgagagagaatcagcacaagaatcctgaaaactcaaaaaaccagagtgccttcttttctccagacaatcacatcacttctccagtaagggttctgaaccaggttgagatggctgaaataacagaaacagagttcaaaatacggataggaatgaaaatcattgagctacaggagtacattgaaactcaatacaaggaagctaaaaatcatgataaaacaattcagtaggtgacagaaaaaatagtcaatatagaaaagaatgtaattgacctcatagagctgaaaaatacactatagtaatttcataatgcaatcacaagtattaatagtagaatagaccaagcagaggaaacaatttcagagyttgaagactggctttctgaaacamgacagtcagataatagagaaaaaagaatgagaaagaatgaacaaaacctctgagaaatatgggattatgtgaagagaccaaatctgtgattctttggtatctctgaaagagatggggagaatggaaccaatttggaaaacatatttcaggatatcattcatgagaatgtccccaacttagctagacaggccaacattgaaatttaggaaatacagagaaccccagtaagatacttcacaagaagatcatccccaaaacacataatcgtcagattctccatggttgaaatgacagaaaaaatgttaaaggcagctagagagaaaggtcagctcacctacaaagggaagttcatcagagtaacagcagacctcttagcagaaaccctacaagccagaagagactgggggccaatgttcaacagttttaaagaaaagaaattctaatccagaatttcatatccagccaaactaagcttcataaacgaaggagaaataagatccttttcagacaagcaaatgctgagagaattcactaccagcagacctgccttacaagatctcctgaaggaagcactaaatacgggaagaatggatggctaccagccactacaaaaacatggtgaagtatacagaccagtgacactataaaacaaccacataaacaagtctgcaaaataaccagctaacatcatgatgacaggatcaaatccacaattatcaatactaaccttaaatgtaaatggactaaatgccccaattaaaagacacagacgggaaaattggataaagagccaagactcatcagtgtgctgtattcaggagacccatctcatgtgcaaagacacacataggcttaaaataaagggatggaggaagatctaccaaacaaatggaaagaaaaaaaaaaaagaaaaaaaagcaggggttgaaatcctagtctctgataaaacagactttaaaccaacaaagatcaaaagagacaaagaaagccattacataatggcaaaggaatcaattcaacaagaagagctaactctcctaaatatatatgcacccaatacaggagcacccagattcataaagcaagtcctcagagacctacaaagagacatagactcccacacaataagactgggagactttaacaccccactgtcaatattagacagatcaatgagatggaaggttaacaaggatatccaggacctgaactcagctctgcaacaagcagacytaatagacatctacagaactctccactccaaatcaacagaatatacattcttctcagcaccacattgcatgtattctaaaattgaccacaaagttggaagtaaagcactcctcagcaaaggtaaaagaaaaggaatcacagcaaactgtctctcagaccacagtgcaatcaaattagaactcaggattaagaaactcactgaaagccgcacaaccacatggaaactgaacaaccagctcctgaatgactactgggtaaataatgaaatgaaggcagaaataaagatgttctttgaaaccaatgagaacaaagacacaatgtagcagaatctctgggacacatttaaagcagtgtgtagagtgaaatttatagcactaaatgcccacaacacaaagcaggaaagatataaaattgacactctaacatcacaattaaaagaactagagaagcaagagcaaacacattcaaaagctggcagaaggcaagaaataacgaagatcagagcagaactgaaagagatagagacacaaaaagcccttcaaaaaatcaatgaatccaggagctggttttttgaaaagatcaacaaaattgatagaccactagcaagactaataaagaagaaaagagaggagaatcaaatagatgcaataaaaaatgataaaggggatatcaccactgatcccacagaaatacaaactaccatcagagagtactataaacacctctatgcaaataaactagaaaatctagaagaaatggataaattcctggacacatacaccctcccaagactaaaccaggaaaaagttgaatctccaaatacaccaataacaggctctgaaattaaggcaataatgaatagcctaccaaccaaaaaagtccaggactagaaagattcacagccaaattctaccagagatacaaagaggagctggtaccattccttctgcaactattccattcaatagaaaaagagggaatcctccctaactcattttatgaggccaacatcatcctgataccaaagcctggaagagacacaacaaaaaaagagaattttagaccaatatccctaatgaacatcgatgcagaaatcctcaataaaatactggcaaaccaaatccatcaacacatcaaaaagcctatccaccatgatcaagtcggcttcaccctaggatgtaaggctggttcaacatacgcaaatcaataaacgtaatccatcacataaacagaaccaaagacaaaaaccacatgattatctcagtagatgcagaaaaggtctttgacaaaattcaacagcccttcatgctaaaaactctgaataaactaggtattaatggaacgtatctcaaaataataagaactatttatgacaaacccgcagccaatatcatactgaatggataaaaactggmagcattccctttgaaaacyggcacaagacaaggatgccctctctcaccactcctattcaatatagtgttggaagttctggccagggcaataaggcaagataaagaaataaagggtatttgattaggaaatgaggaagtccagttgtccctgtttgcagatgacatgattgtatgtttagaaaaccccattgtctcagctcaaaatctccttaagctgataagcaacttcagcaaagtctcaggatagaaaatcaatgcgcaaaaatcacaagcattcctacacaccattatcagacaaacagagagctaaatcataagtgaactcccattcacaattgctatgaagagaataaaatacctaggaatccaacttacaagggatgtgaattacctcttcaaggagaactaccaaccactgctcaacaaaataaaagaggacacaaacaaatggaagaatattccatgctcatggataggaagaatcaataccattaaaatgcccatcctgcccaaagtaatttatagattcaatgccatccccatcaagctaccagtgactttcttcatagaattggaaaaaactaaagttcatatggaaccaaaaaagagcctgcattgccaagacaatcctaagcaaaagaacaaagctggaggcatcctgctacctgacttcaaactatactacaagactgcagtaaccaaaacatcacggtactggcaccaaaacagagagatagaccaacggaatagaacagagccccagaaataacaccacacatctacaaccatctgatctttgacacacctgacaaaatcaagaaatggggaaaggattccctatttaataaatggtgctgggaaaactggctagccatatgtagaaagctgaaactggatcccttccttacaccttatacaaaaattaattcaagatggattaaagacttaaatgttagacctaaaaccataaaaaccctagaagaaaacctaggcgatagtattcaggtcayaggcatgggcaaagagtttcatgactaaaacaccaaaagcaatggcaacaaaagccaaaactgacaaatgcgatctaattaaactaaagtgcttctgcacagcaaaagaaactaccttcagagtaaaccagcaacctgtagaatgggggaaattttttgcaatctattcatctgacaaagggctaatatccagaatctacaaagaactcaaacaaatttacaggaaaagccaaacaaacccatcaaaaagtgggcaaaggatatgaacagacacttctcaaaagaagacatctatgcagtcagcagacacatgaaaaaatgctcatcatcactggtcgttagaaaaatgcaaatcaaaaccacgatgagatacgatcttatgccagttagaatggcaattattaaaaagtcaggaacaacagatgctggaaaggatgtggagaaatagaaatgcttttacactattggtgggagtgtaaattagttcaaccaatgtggaagacagtgtggcaattcctcarttatctagaactagaattaccatttgacccagcaatcccattactgggtatatacccaaaggattataaatcatgctactataaagacatatgcacaygtatgtgtattgcrgcactattcacaatagcaaagacttcgaaccaacccaaatgcccatcaatgatagactggataaggaaaatgtggcacatatacaccatggaatactatgcagccataaaaaaggataatttcatgtcctttgtagggacatggatgaagctggaaaccgtcattctcagcaaactattacaaggacagaaaaccggacaccgcatgttctcactcataggtgggaattgaacaatgagatcatttggacacagggcagggaacatcacacactgggtcctgtcggggggtgtggggctgggagagggatagcattaggagaaatacctaatgtacatgatgagttgatgggtgcagcaaaccaacatggcacatgtatacctatgtatcaaacctgcacattgtgcacatgtaccctagaacttaaaatataataaaaaaaagaaaagatgctcagcgttatctgtcattagggaaatagaaatcaaaaccacaatatgacaccacttcacacccactaaaccmgacaacaataacaagcatcagcaaggattcgggaaccttcatacattcctggtgtaaaatttaatacttgtagaattgttcaattacttggataaaaaaagatcaaggaatccagagctgttttttgaaagaattattaataataaaatagaccactagctagactaataaagaagaaaagagagaagattcaaataagcacaatcagaaatcacaaggaggatattatcactgaccccaccgaaatacaaataactatcagagtatattataaacacctctatgcagataagctagaaaatctagaagaaatgaataaattcctagacacgttcacccacccaagactgaatcaggaagaaactgaaacctagaacagaccaatagggagctctgaaatttagacaataataaatagcctaccaaccaaaaaaagcccaggaccagatggattcacagctaaattttaccagatgtacagagaagagctggtagcattcctgctgaagctattccaaaaaattgaggagggactcctccctaactcattctatgaggccagcagcatcctgatatcaaaacctgacagagatacaacaaaaaaaaactgcaggccaatatccttgatgaatattgatgcaaaaatctttgacctaatgctagcaaaccgaatccagcaacacatcaaaaagcttactccctgtgattaagtaacctttatccctgggatgcaaagttagttcaacatatgcaaatccataaatgttattcatcacataaacataactaaagacaaaaactgcatgattatctcaatagatgtagaaaaggcttttgataaaatttaatacccatttatgttaaaaaactctcactaaactccttattggaggaacatacctcaaaataataagagccacctatggcaaacagacagccaacatcatactaaatgggcaaagctggaagcattcccactgaaaatcagcataagacaacgatgccctctctcaccacatccattcaacatagtgttagaagtcctggccagggcaatcaggcaagataaagaaataaagtgcattcaaatgcaggtgacataatcttatatctagaaaaccccatcgtctcagcctaaaagcttcttaagcttataaacaacttcagcaaagtctcaggatgcaaaatccatgtgcaaaaatcacaaacattcctatataccaacaatagtyaagccgagagccaaatcagkaacatagtcacattcataattgccacagaagaataaaatacctaggaatccagcaaactagggaggtgaaagatctccacaaggggaactacaaaattctgctcaaagaaatcagagatgacacagacaaatggaaaaacattccatgctcatggataggaagaataaatatcatgcaaatggccatatggcccttaacagtttatagaaattcagtgttattcctattaatctaccattgagattcttcacggaactagaaacaaactattttaaaattcatatggaagcagaaaagagcccaagagccaaggcaatcccaagctaaaagaacaaaactggaggcatcatgctacccaatttcaaactgtactacgaggctacagtgaccaaaacagcatggctctggtacaaagacaaacacatagcccaatggaacagattagagaacccagaaataaggctgtacacctacaaccatctgatcttcgataaacctgacaaaaacaagcaatggggaaaggattccctattcaataaatggtactgggttaagctgctagccatatgcagaagattaaaactgaaccccttccttatatcatatacaaaaattaactcgagatagcttaaagacttaaatgtaaaaccccaaactataaaaaccctggaaatcaactaggcaataccattaaggacataggaacaggcaaagatttaatgacaaacatgctaaaagtaattgcaacaaaagcaaaaattgacaaatgagatctaattaaactaaggagcttctgcacagtaaaggaaactaccaacagagtgaatagacaacctacagaatgggagaaaatttttgcaaactatgcatctaacaaagatctaatatccagcatatataaggaacttaaacaaatttacaagagaaaaacaaccccattaaaaagtgggcaaaggacatgaacaaacacttttcaaaagaagacatacatgtggccaacaaaaatctgaaaaaaaagctcaacatcactgatcattagagaaatgcaaatcaaaaccacaatgagatacagtctcacaccagtcaaaatggctattattaaaaagtcaaaaagtagcagatgctggtcagggtgtggaaaaaaaggaatgcttatgcactgttggtgggagtgtaaattagttcaaccattgtggaagacagtgtgacgattccttaaagacctaaaagcagaactaccattcaacccagcaatcccattactgggtatttatatacccaaaggaatataaatcattctattataaagacacatgcatgtgtatattcattgcagcagtatttacaatagcaaagacatggaatcaatctaaatgtccatcaatgatagactggataaagaacatgtggtacatgtttgcgcttcccgggtgaggcgatgccttgccctgcttcggctctcgctcagtggactgcacccactgtcctgcacccactgtctgacatgccccagtgagatgaacccgatacctcagttggaaatgcagaaatcatccatcttctgcrtcgctcacgctgggaggtacagactggagctgttcctattcggccatcttggaatcgcccccgtctttttttttttttttttttttgagattgagtctcactctgttgcctaggctgaagtgcattggtgcaatctcagttcacagcagcctccccctcccaggtttgatcgattctcctgcctcagccttcggcgtagctggctgtaatttttgtagtagagacggggtttcaccatgttggccaggctggtcttgaactcctgacctcaggtgttgcacctgccttggcctcccaaagtgctgggattacaggtgtgagctgccgctcccggcctcttttttccagctcacttttcccaaccccttcagttgaggcctgagtgctgccaatttagaaaaagatggcatctggctaagtctatgctcttctagcacaaagcatgaacatctacttttgtcaggcattgctacctcactatcaatgaggtggctgtaccagaataaagccttctggctcaacaccctagagagtaaagcagcccaggcttcctccacaggaaacccagacagttgttcatccatattaccttaaggcattttccattccacaagtggaaaacactgccctagatccatcccctacctctctgttctctgtgtccccggctggacattgcttgaaacaactattatagggtgagttggttcaatcttgcctaactgtgtcccaggactcttatcattctgccaccagaaagttcatatgctcaaaattggtccttaggaccactgaccttagcactctccctctgtgagggtacaatttaggaataacttttgttggtgaaattgtggcaggaactttgtgcctgtgtcacacaatcaattagacactttgcaaggtagaggcattattattatcacaagcagatggtgaaatgttactccatccttctgtgcctgctgtaacttccttgcacagcatcatttagggtgtttctttgcaaattgcagtttgtttgagaaagatttaaagccctgagggtttggtgaaaagctcttggttaygagtgcatctactttgtctgtcagtagcaaaaagggcacctctgattaatactgactttgccctgcaagtcaggtagagtgcagatgaggtccttttttcttcactactattctagggtaagagaaacttggaagatcatctgcctgtggcctctagaagaaggttaagtgagcgttgagccaggaatggaggcatttcttgtaatgaacttctctatagaacaagatagcraatctgttacccagaattctagagggctgcttccagaagaaaggtattcaggccaggctctctgccttgcaggagtgataccctgaagagaggggacaggtgtcatgagcacagtaaatgtggtggcagcgaaaaagcagaatggcactgagggcatcctgggtggggataggttagaatgagagatrgggaaagatgaatttttttttttaaarcagatgctttaaggttggggcaatggatgggtgaggaagaattttaggctgtgctgctgtgcaatgcactggcaaatgcctacagagtcattcttcgtggatatgttattgggcagatgcaagtctcraggcaaccctgctttatttgggttacctgtgcataaaatcctgtttgcacaggttctgagaggaatgaaggagattgaaaaggcccttgcggagtctgtatcttatatgtaggtgagacaggcttagaattgttccatagtaatgcacagtcaagcacaacatcatgtttgtggaaatcccagagggggccctgggaaatgtgtcagaggagaaagtttgaatgaggctttcttgtataaaaagaggttttgtgaccagattcacagctacttctgtccacttttcaacattgtatagatattattatacaaggcatgtctcagaattagtggatcctctggctgaactagtagtaaatggatagattaattgatgaatccctgccatttttctgatagtgtgtgccatamgtagttagagaaggctcaaaccttcaccaccatctgaatataatagtctttgcaaatacttccattgcagtatctaattcttagtcctcacatacagtggtctccccttattcacggttttgctttctgtggtttcagttaaccatggtcaactgtggtccaaaaatattaactataaaattccagaaataaacaatgtataaattttaaattgcacaccgtcctaagtagcatgatggaatctcatgctgtctcgctccattgtgaggaagtgaatcatccctttgtccagcatatgcactgtagatgctccctgtccattcatcacttaatcattatctcagttatcagatcaactgtcatggtatcatggtgcttgtgttcaaggaacccttgttttacttaataatggccccagcacaagagtagtaatgctggcatagtgttataattgctctattttatcattagctatcattgtcaatatcttactctgcctaatttataaattaaactttttcataggtatgcatgtgtaggagaaacatagtactgtttggtttcaggcatccactggggatcttgaagcatctgtcctgcggataaccagggacttctatactatgtgttgagtactgtgctgaataccatatgggaattgtctaattttattgctctaagattcttcttaggtggatattatgagcattccacctttgcatgtgagatgcaaagaagttattgttctgtcagttatgcaaggttgcacagacagtaagtggcagaggcagaattcaaactcccagatctgagttcataactatttccaaatactgtctccttcacattacaatgatatcttcagaaactctactgcatcctggttattactttatattgaaaactgtatacctctaacccagtgatgcgtcaccatttttggacccctcttcagagaaaaatacacacacacacacacacacacttggttgcattcatacatgtatatatgtgcatatgtgtaattttttctttttaatttcagaggttttaaggatcccaagttgaggacacctaacctacagggaaaactcatttgaacttggagtctagttgctgtttacttccttatgagggcactaattcttgctgatattaacaaaccctttcaagtatttccagtgtagcagagtcaaacttcaaacctggctgttggtctaatatataacaagactagtaaccatttatttattacgtgtacctaactcttagggttgacagtgggtatacacactggtgaagtcctactggttatacgcagtgggcatctgtaatgatttggtcaggggtgaatatcatgcctgctaacaactttttgaggtaggtgatgttacatattatgcccgttgttcaaatgagaatcctcaggctcagagcacttcctcaatagcttacatgtggcagatgcctgtcaatctaatttcaaatctgctctgatctactttcctatcccggctttgaatgtacctttccttccaaatctgttacaggttctgcattacatcacattgctttctctttctcaatctctttctgtttctcaaccttggcattattggcattttggcttggataattctgttgtgggggcttgtcatctgtattgtaagagcttccctgtaagcagcatgcctggcctctacccactggatgccagaagcaccctctaccctccaggttttgacaatcacagatgtctccagaccttgccaaatgtcctctggtgagcaaaaatcactccctgttgagaactactgctttcttgctcttttgtatgctttctcagtctctctctctctctctccatacatagaattataaacgtttatcgttgtgtgctcattgtttgccagaaaaagtgtcaagacccttccatgcattatatcaagtcctcaaaacatcccaccacgttgtttacttcatttacagatgaggcgagacctgggtattttggcagattagtaagttgcttagagtcacacagctgctaagggtggaccacactgggatttgtcttagctctgtgtgccctcagggccctgggctttatgagaaatgttttcactgagctacagagttgtttagggcttcaaattaatcagactctgtatattttcattgtttgggatttgttcagctagtaagctggaagaaaattttaatgaaattgtaggtcatgtatttcgttattatttatttttattattcttacattcttgcttttattgtcaatcctttctcactaaaacatcatcatccacaaaaaaattaccaaaacaaaatgttgcctttgaccctaatttatgagcataaatatcatcttattgaacttaaaacataaaagagatttctttctaagagaacaaactatttctctaaatcatcttcagataactttttcaatgggtgctttatgtgcttcttaatagcacagattactactaaataacttgaacataaagacaataaattttctggaaattctaatacggaagttttttaacaaaataatttattgtcagcaagcagtatatatatatatatatttttaagggacatatatactttagagctctggggcctttttgcttttctcaaattgagttttaacaacaacttcaaaattaaaaacatgtattaaaagagtaattaccaaataggaaggatgatggagaagagggtgcaggcttaattgagcttgacgtagtgggtcgttgggatgtaatggtgtaagaaaaatagttcttggtatwtgtacctgctcagtatctgtactcctcttctttgagttataaagtagatttttcccttggggaatagccttctccaccaaacacagtattattggagctgtcaaacaccttgccttccccaggccaagcagtggtcatgtgaccaaggcagtgcccaagtcccaaaccccacccccctacccccaccccaccactctttttttttcagagattctgaatcttgagtacattgacccaaggatggaaaatggttgttgctgattcttcctgctgatagtagcctgaagaactaactgaccatgaattcctgggagcctgactcctgttgcttctttttttttttttttttttttttttttagacaaggtctctctgttgcccaggctggagcacagtggcatgatcatgggtcactgtagcctcaacctcccagactcaaacaattctcccatctcaacctccctagtaactgggactacaggtgggtgccactacgcccagctaaatttttgtagagactgggttttgccatggtgtccaggctcgtctcaaactcctgggctcaagtgatccctctgcctcggcctcccaaagtgctaagattacaggtgtgaaccactgcccccagcctcctgttggttctaagcttcatttagttttactttgatttttaggcactattctgtatacttgcagtagatctcttttctattttgctaacgttaggcaggatgatctgcgttgcttgaccccaaagaaccttaactaatacgttgatttgatgttaatagtggtgatgatgaggacgagtaggaggaggacaacaatagtaacagcagctgacatagattgattatctaatttaatcttatgaggtagatattgatatatgctcccattttacagatgaagaagacttaggaaggttacgtgtcttgccttcttagattaataagaggcaaatccaggattggaatccaagtatgttttgagagcccaaactcctaattgcttcactgattggcatgtagggaggatgtaccaaaagcatacattcatgttaggtctattttttacttaataccttatttttttatcgcaagagtgggaccatttctcttccatgtgttccttgatacaaaaccagctgcaaaatgttaagtgcatattttttcttgtctttatgtggtaaattagaataattattgttagttaagggatgtgaacgagatgtctttatcaaccacgaagttaaatggagtttctgtttttaaaccacagaagataatgctgtcttgacagattgtgagtgacagaaagaaaagtgtttccagcaggatccaaatggagatgttgcaggagaaagcataaacagcagaatcagaaagctctgggggttttgtatggagtgatgtcatcaatttttactcttttggtgcctgacaataaaataacttggtaccttcaaatttttcctattgattttaacaagggtgacaaaaaaggggaaaaacgttatttttgtttatctttagacagtccttagatataattctaaacatatatcatccctttccctcttgtgattgttgatgcctctatctatttgttcatatccttctctctttatctctacacacacacattcacagccacacatgcatatgtactttttctcccaaacacagccgcccagtaaaattgacacccactgggaggcccatggcatttggaatttggcccattgactccgtggtgaatttggataaacatctctaaagcaaagctctctcttttttcatgtaatataaatccctgtgagactagaaatccgttcaaattctatatcatttcagaccatccctacaaaggcagaagccttggggaaaatcctcttgggaggtgctccactccttgcatacacagttgaaatatggataaaatgaacaacaaaagcaactttcataacaatccttggtcataaacatgggttcttggaattttgaaaatgtcttaagaatcacctattcaaatgattctcacactttgagactggtacaatttcccccctaaaacaaagggctgactttactttgtcaccttgaagttttgccccaaaaaagggcatgaatgaagaaaactatcattcactattttggggggctattttgatactaaaaggatgaaaggcataatcttggaattaaaataattaaatatatatttagctttataaaaacctctttgattttggcatttcaccacgagtgaatgaaaacttcatcatgtattggcatgcgcttgttgattggcttttaggaaccactgattcagatcaatcttatctgatgcttgcttctctaaagatttctgcgaagggaatattccatttatacttgaatacctacagataagtggaactcattatttataaaaacagtctattctgtctttggataacactgttgaaagatttttcttatgtcaaattgaaatctctcttcttatagtttctactctttggttatggggggataatttggggctgaatagaataaaacttagtctctttacacacaatgagtctttgaaatgacaactgctatcctagtcccccttttcatctctccttgccccagagttcaagtcttctgtaaataggctcaatccctttaactatttcttttatgtgtttcaaacaaatatttacaattgtattcaatttttttttactgaagtatacatgctacaacatggatgagcattaaaaacatgctaagtacaataagccattacaaaaaaggtcacctattakaagattccatttatatgaaatgcctgaatgggcaaatccatagagattgaaagcagatgagtagctgccaggcactggaggaagaaggaatcggggaatgtatgcttaatgggtataggatttcccttggaggtgatgaaatgttttagacctagatacaggtagttgttccacaacattgtgaatgtacttaatgccacaaaactgtacacttaaaaatggttaaaatagtaaattttacgttacggatatcttaccacagtatgtatatattgagctgggaatggacctggtagtctgacacaagagccttctcaccccactttggatgccctatgccagttttccaaatgttgaataaatttttttccctgctcaaaaaaagtctgagtaccactggttcagtaaatattcccagtaggagacactgatgtaataataggctaagggaatatatactgatgtcagtaattccatgggaatcatttctacctccatcctaatcttctttttcttcctcttttgttgatattccccaatgtccatgactctcaaccatttcccacacttgcagtacttcacagatgactacttatttcggttttttccagcgcagccatacttgcagttttcatggtgtctttttggtaggtacaacagcataagataatgttcaagtagaatgcattcactgtattttgtagttcttcccagcattttgggtcactaaaaattcgtgttagagaagtagaaaggaattgtgaaatcaaagatagtagtcccattttggatacctgcataatatgaaaattttcttggcattggtgaatattaatattttatactccctcataaggttccttcattggctcctgttggagcacagtttccaatatattttctcccagattttgatgacttgccytgcaaaattttttgaagtttacatctatactttaaaaatttcacaaaggctctttatcttcatagaaagcaagggattcagcttcgatttgctaaattggctgtacaaggtagcatgttgttattctatttagaggacttgaaagcagactcactgattcaattatatttaatttgtaattagctccctcccaagcagctaatggtgcataacttggtcactgctattctggatgggcaaatagtagaacaaaatgacttcttttagagagagcccatcttagacagagtcccttctattatagtaatatttcttgggatgaccttccagttctaaaacaaaactcttttctgggcagtgtcccctgatccacagaggtgggctcccagcagctgagaccataatgtttgactttttaacttgagggcagagatgagtgatctagggctaggtatctgattatgccaatcagattctctcttctaagaattttgaattttgaattgaaagcaaaaagtagttattaatggtattttagtcattcaaatagcagtgctctagagggaggtctctaagatccggcctctcagttctctgaagctaccttgatttccttcttcacaaagcttgggttttcattctcctttcaattttgtgagatactgtagtattcttttcatttttcttatttttgaatagacttgctagggctggcctatatttcttgccaccaaacttacctagtacagaaatcaaagaaatgaagtctctaccaaatctaccaatgcaagtgataaaggctgtatctacttggtggaaatgaattacaacatktaattttgtgcgtatgtgtgtgtgtacatctgtgtgtgtttgattgaattacttagcattttaccagatgctccagagccttattgtttttgtcatcattatcatcatgagcatcattgtcagtcatcacaatagctcttgtttatggaacactttttatgactcagcactgtattaagcactttgcatacaaaataacatttattttataattacaacaatattatcgaatggattctaccattatccccattttatagtttaggaagttgaggctgagaaccttgctggaagttatacatctggaaagtgatgtagcggtgatttaggtttgtcacactccagagaaagattatatactcttaagatctgtataataatatacaaaagtggtccccaaaggtgttacatattcttagtttgttgttctctttatgttggatgtggaagtgggatagagataacattgtggcttttggaaagttcaaactctatttctgttggcttaatttcattatcatttctttcatgtatagaatattgtttgtggggaatcaggcaggagagacacaagattagataaattgtcttgagaaggcctctttgaagaggtgacattgaaactgagatggattgacaaaagtgaggcaggcatgtgaagatcagggacagggtgttccagggagagggaagaacaaatgcaaaagcactgatttgggaattaacccaatgggattagaagaacagaaagtagatacatatggtgggagaggagtgaacaagggagtgagtggtaggagatgatggagggaaaggctatgtctgtatcactagaatcttataggacatagtacagaatatggagtttttatcagcacattagcaaattcaaggaggaagaataatatgatttagtttatatgatgactttatttagttataggatgaatttctgcttctggtaatgatagggtagctaataatccaccaagagaataactagaaaagccagccaaaataaagagaagatatttgtttgaaggtattgaagggctaccaaggcatccaggacttgaggggtcagaaccctggagggaggaggtgcattgaagtgacttcaacattctcattctttttctttttgaagcatttgttgatttgtaaatgacaaagacctgaaaagcttaaaagtccaatagaaagcagcagctaaagagatggggaagagattttggaggtctcaagaatgcaaaaatcctaaacaaagcaatagcagactgaacaatatagaaaaacaatatatgtcatgacaaagttgtatttattatagatatgagtggtaaggtaatgttcaaaaatcaaatgaygtaataacagaaaaggagaaaagccatatgataaaattcaacatctaatcctgataagaacttttaacaaactaggactataagtaaacatccttaataaagactctctatatattttttaaaaactacagcaaatatcatacttaagtgaaacattgagagccttgccctaagattaggtctgagaaaagggtgactgttctcaccactgctgttcagcattgtactggaagtcctggtgaatgtagagagacagaaaaaaaagatatgagcatttgaaaggaaacaataaaattcttttatttgcagaacatataattatgtaaatttaacaaatgaatttagcaaggatgctagatacaaagtcagtataaaacatcaattgtatttctacgtaccagaacaaagaattacaaaatgaaattttaaaaagataccatttaaaatgaatccagcaacatataaaaagggttataaactatgaacaaattgtttttccaaagaaggtgaggtggaacaattgcatgtctttatccaaaaattagcctgtactgtatacaaagttaacttggaatggattacagaccaaaatataagctttaaaactataaaacttctagatgaaaacatacaggaaaggttttatgactttatattagtcaaatatttcttagatataacaccaaaatcaagatttcctaaaagaaaaaaacactgataaattgaacttcataacattttaaaacgtgagttatttaaggacactattaagaaaataaaaagacaaaccacagaatgggatgagatatttgcaaatcatatctgataaagcatttaatatcaagaatatataaagaattcttatgtcggtaataagaaaacaaaccaaagcatatacattaatggcaaataatcacatgaaaaatgcttatcatcaccaggaaaatgcaaatttaaaggagaggaatagtatgaaatattattatataccacattgaaataccaatttatacccactaggatggctaaagtaaaaaaggcaataagaagtgctggtgaagatatggagaaactgtaacctttaaataaagctattaggaatgtgaatggtacagctactttggaaaacaatttggcactttttgaaaaggttaaacatgtacttaccataagacttagcaattccacttcaaggtcttgaaatgaaaacttgtrgagaaatgaaatgtatgtctacatttatagcaatgttgtttgtaatggtcccaagctattatagaagcaatctaggtatctatcaattggtaaatgggtaagcaataattagtatatttatacaagggaatactactcaacattgtaaaggaatgaacagcccatacctgaaataacctggatatgcttcaaaagtattawgtgaagtgaaagaatccagacacaaaagaatctatagtgtatgattcaatttttagaaagggcaaaactacagagatggaaagcaaatcagttgctgcctggtgtggggagtggggattaactgcaaagggcatgaggtaacagtttggattgatagaagtgttctaaaactatgtagaggtgatggttgtataactatataaatgtattcaaaactcatcaaactgtacatctaaatagatgaatttcatgctatgtaaattttacctcaataaatgtatttaaaaagttaccacttaaaatagcttgaaatattaaaaacataggaatatatctaacaaaagatgtattagacctctacagagaaaggtacagaatattactgaaagaaattaaagatgacctaatatatgaaaggacacaatatatccatgaattggtgactcaatagggtcaagaggtctattctctccaaattgatctctaaatttcatgcaattctaatcaaaacaccattatgcaaaaggcaaagaataggcaagataattctgaaggggaatcagaacaaagttggaggacatatactatctatcagctcttcataaattcattataaatctacaataattactataatgtggtattgcacaaggataagcaaatagcaatagattaatggaacagaatggagtgtacagaaatagagccactcatgtagggacacttgaattttgagaaagatgacactgtggagcaatgaagaaagggcgatcttttcattaaatagtgctgaatcakttgggtatcagggcagggaaaaatgaacctcacatcataaacagaaataaattccagttggattgctgatctgagtgtgagagctaaatcaataaagcatctagaatataacatcatagaatgtcttcatgattttgggatagccaaatatttcttaaacaggacatgaaaaaacactatccaagcatcatttcatctaatagccccaaagtggaaacaacccaaatgaccatcaactgatgaatggataaataaatgtggtatatccgtacaatggaatattattagacaaacaagtagagaagtactcatatatgctgcaacatggatgaaccttgaaaacatcatgcaaagtgaaagaagccagtcacaaaaacaaaataaaaaaaacacatatcatataattccattgataagaaatacccagaaaaggcaaatcaataaagacagagagtggatgagtggttggttagagtttagtgagggtgaaggtgttgggaggaatagggagtggcagctagtaggtataaggtttctttttctttttgtttttgagacggagtctcgctgtcgcccaggctggagtgcagtggcgcgatctcggctcactgcaagctcctcctcccaggttcacgccattctcctgcctcagcctcccgagtagctgggactacaggcgcccgccacttcgcccggctaattttttgtatttttagtagagacggggtttcaccgtggtagccaggatggtctcgatctcctgacctcgtgatccgcccgcctcggcctcccaaagtgctgggattataggcgtgagccaacgcgccgggccaacgtttctttctggggtgattagaatgttctaaaattggattgtagtgattgttacacaactctgtggatatactaaaaaactttgartcacatacacttgattggtgaattggatggtatgtgagttatatctcaataaaactatttttaaaacaatagcaaaaaatgaaaagataaatatattagagtacatcaaaatggaaagtttatgaactaaagacatcactagctgagagaaaaggcaagccacagaatgggagatgataattacaatatctctggcaaaggactagtattcagatcatataaatatcatctacacatcagtaagaaaaagaggtagtctacggccataccaccctgaatgcatccaatcttgtctgatcttgggagctaagtagggatgggcctgattagtacttggatgggagaaaaatagcccattggaaaaaagggcaatgaatttgaacaagccctttacaaaagaggatagtcacatggctacacagcatattacaaagctcttatcataattagttattagagacaatgagctaccattggacactcatctgaatgactaaaatgaaagaagattgataatactaagtgttggcaagggtatgaagcaactggaactatcatacagtggtgtgggattgaaaattaatataattactttagaaaactggcaatatttagtgaaaaacaattgtaggccctgtgacctttcacttctactagatatacgctaaaaatgtgagaatgttcgtagctccattatttttaatagcttttccaaatggaactcaatctgaatggtcatcaacattagaatgaataagtaaaagggtatattcacataatgaaatatttataaagtaaagaaaatgaatcaattacttctagttgcaacagcaaggatcattctaacagcagaagacagatacaaaagcatgtgctgaatgttaccattcatataaaatcccmaaccatgtaaaactaatcaatgttgttagaggtcaggataatggtttcctttgggctggagcaggaggaaattaattgggaagggatatgaaatgtgcttctaggatgatgataatattatatttcttgatttgggtagtgtttaagtgggtatgtgtgccctgtaaaaattcattctgatttatgcacttttctctatatcagttacatttcaataagcactttttttttttggagaatctattggagcaatgcaaaaatgaggggagcttcctaaaggaagctgttacaattacccaggtgagacaattgtatgggattcagggtagtggtgggtatagaaagaagttgacagatttgagaggtattaggtgtctgctcacgacttggtgattgatttaatatgggagtgttagtaggtcgaattgtgtgccctgcacagaataggtttacttgtgtgcccccaaaaagatatttgaagtttgaactctcattgcctcagaatgtgaccttatttggaaatactgtcattacagatgtaattagttaagatgaggtcatactggagttaagatggaaccttaatgcaatgtgaatggtgtcctcatagaagaggagaaaagacacagtgatacagacagatgaggggagaacgtcacatgatgacagaggcagagactggaaattaggaagaggcaaggaaggattctaccagaagtctcagagggaggaatatctgggtggatggtgccctgaattgaccaaattgagtttaacatggaccatcaaaccagaatttgaaaatttaattaaaaggctacgatgatggttttagcagacagtagaacataatgcatcaaagattgggcactttgagggaacagttttttcctcattctgctttcagccaggaattcacctaaatctccttgaccagttaggaatatagcttctttttaaagcatttcagagagggctgacaacctcccttagaatgaattgraagaatggcagcaggaggggcagcaggagaggcaggttggtgtgagtaggtaacatgtcccktcttgttttttccaagttgtggggcacagctggaagtggaaccctggagacacagcctctctattttattatgcttcgggaaatctgaacaaggaagcagggctactgcaaattagctacatttccctttctatttctcaattccaagtactaggagatttgctagggcccatattcttttaatcttttctgggcagtgggagatagatctttgtcagatgcttctctccaggccgccttgaaatgaagaagcaggcttgtgagctgggaggccacraagtcctactaagtttgggtatctgcctcttccgctttttgccgtgatcctttgacaagctgaccttctctgagttctctgcagatttcattcagtggcatgcatgtgaattggcatgaactttctcrttgtttttttttttcctgctgtgggagccaggaatgtttccccattggtgggaaatgccccactaatccatctctttcaaagctgtcagggctcttttttggcaccgaaagaaaaataattgagtctaatcaagcaccttaaatattcaatatgattagaggaaaaatgaatgggttttgtaaactcctattgatactaaattctatttgcagttagtcttggacataaatttcagaaaattacatgtaaatgtactcattagtgcactataatatcgaacatctattttgtctctgggcaatttttcttttcttagcacaaaagctatttctacttattaaaaatagtaattgattttccatttttaaaaaactttttttttcagttccgtttcatctctgcattttggctcatgcattccaatagtgttttcctaaggctggtaaaagaattacattatgctctaataattctgagggcaaaggggaggaagggcagatttgatgttactgaggaaactattttaaaactggagtaggctcagaaaacagatctctaaatgacaacttgaatggcttcatgctaaggatttgattatattgtgcatagttttacctgaacatcttagatcttattttgtaattaagtattttgataaagctctaactaaatagtacttgagtaaaaatatggttttattaaaaggctctaaaacttaccaaatcagccatttagattagttgtaatatgaatgctttctgtgtgcttttaaatgtttgtttgacttctattccagtgtaaatttatttttaaaaaatgaaatactttaagagtttgatgataattttaatttaaaaatttatttattttaaatgacatttattgatatataggayatgttccattttcacaaataattttggggaaagaaataaaaatacttagcaaaaaatactttaaatcacatatttaagtgtgattttgtagggagaatatataagtttgttcatatgagtatggtatgtacctgaagggcaagtgaatgaacttctttttgtcactttatgaatccatttttttggttctattttgttttcagtgcttaactgaagataaattgagcacagagtaattctggtatacataggttgcatgtgtatgtgtgtgtgtgcacacgcatgtgtgcctgtgcatgtacatgtgaaatacatctttcataccatcaaataaattacatagacactagagatttagaaagtatatacttgyaataaatagggaggagaagattttgcatattttttggtattatcctatttttactatttatttattatgaacagaaaaatgacattttttttgattcgtgaagtccatcaaacaaagttctttgctgaatgtgtttctcctcctagtttatattccatattatggcaggtaaacagactggtatccaaattttttaaatctgcttgcaaaaagccagaaacactatagtgtcctcaaagtgaagatgattgtgtagtttggctttatgggtttggcaaacacaactggctacttatactattagttatttagtaattaaatctccaggcagtatattaagaccaaggtggtaaagcctcagccatcagcctcaattgaaatctcagttgtacaacttgctagcttttgtgactgcaaacaactttttaaacatgtcacaaggataaattatgatacctgatagagttttgaggaggatttaatgcatttaacattttgagaacaatctctagcacatagtgagaactaaatattaaaaaacttaaaaagttgaatgtgaccatctttttttttctaacctggtctgtggtacccatattgactttcatgttttggaaaaaggacatagaagaaaatgttctttaaattgtattcatatatgaaaattatatttaaaaaacacagattcatagaatgctcrttaaagaaatcagtggattacaaaacttttcctgggtacagctgtatcacttttcattgttaataaagtatctgaatgtgagtgaattattaatattgttcagattatataaaaagckgtaggtggtacttttagcctttatgatcactattattggtttaaagtcaggtcattgtggcacttgcaattcagcttcaagaactatttgctgataatattattggagaaagcaagatgtatagtaatacataagcaatgatcagtctttaaactgactagaccatgatgtcattccaatttctgcatgggtagatgaaagcagggaatggggaggtggaagtgatggatgaagcattggttgcttaatagaaataatgactatcgggtgcctgtgtaatgttttccactcgttcttcctagaagccacagagagaatgggtaaggccccccttttttggtagcaaagaaaaagaaaactccagagactcagtggaaaatgtgccacagagtaggaacgactaataccctgtctattgtttatccccctgagacttcctgcctctcttgttagagcgatgggtgaataaaaattaattagaagctggaatctgattttaagacgggatgtcagacacatatatcaagttgttaggttagctggaaagcataacctgggatttatatatttagaagtcataataaatctgtctgtcatgaaaatcagattacccagtgttgcatgctaatggctatagtcccatggaattgtggtctccccagcaactgcccgctggccctgcctttttctgctttgctgtctgctttaactaaccaccgctctccccagttagcaaagtgcctacttaaagaaatacatctggacctttataaagaggtgttttccgtgggctattgtggcagcctcctatggctctccttgactctatttcttcaacagtcagtcagtgcatcaatcattcaattcactaatgtaataattatttccaggatatttattgagtagttgctatgtgccgggctgtttgcaacatgctaggaatcaacaaagatagtgcctgctcacatggaagccagtgatggtggagagagataagaaaaacacactatgagatgggtgaagtgtgggatgtaaggaactcagacttagggactttgaaaaaggctttccagatgccagtatcttttgagctgagagttcttagctgagtggtgggaattagaccactggagagtttcttgggatcttacaaactaggtgtaaacacttaggattcttctaagatcagtggggaggaagtaggggtgatacattcccactttgctaaaagctgtcagattactgcattctactggcatggctgtttttttttgtttgtttgtttgtttgttttttttaataattgacttgaaggctttgtgcaaagtggtgccaaattacctttttgactttagttctcactctaatttctcgcctttcctgtgctctaagtatgcttgaactctattacccaaatattttgtgggcttctatgcttccattcctgtgtttaccctgagccatagctcctgtcacttcatttctcactagtatatacytcatacattcttccaagtccaattcaatgacactgcacttgggggctttcgttgatttatcttaggcagaattaattctaccttaagtttgtacttccttaagtgggattttcttcatttatccttccatcaaacaaatgtttgttggttcaagattgtgtttcaggtatgtggcaatgatcaacaaactgaagtatctgacttcatggagtttatttaaataataaacacatttagcctcattcatcctgcctgtaagtttggttaggtatttacacacctgtctccttgacttacttgtcagatgcacaaggatgaatactatgttccttgtatgtgcataataaacttgtttttaattaaatgaatgaagaaccaaaagaaacaggatgaatatttgcagagagatttggcctgatactttgtatttcagtgtaaggaaaatgtattgattttggagtcacattgttgcaagttcaaaccattcctctacctcttaacacctgtgtggtcttggataaatcacttaacctctctgatcccactgttcttctattctgtatatttctagctcatggtattgtggaaattagaaacaayatacacaagatgtttatttctgtgctagagacatattaaagactcaataagtaattcatcttttatgtattgtattcttttcaacagacttcccatataaaaatagggtgaaagttttgtagcctatttgtccttagaaacatacaatttgacagactgaggcatgcatggtccgttcagcattcaccatcttggtcctaaaagagtcctcaagagacaygtcatggatggatctcacttttccttttgtctctggattggaaagctttcgttcttttaccagcccttatagctctgtctttcacaccctgacctaagctattatgaaagactattatattttctaccagtaccacctcttggggctgatgaattctggaggcttattttctctatggggaagtgctttgcaaattcaaaagggtttaagggtctcccctctgcatcgcttgtttttggcatgcctccatcrtagctggtaggggttgatatcgcagattatctgttggcctggtgtgcagagaacaggtagtgtttaaatctcagatctttcatctgctacctttataaccttaggtaatcatttagtctatagcttacttcccttctctgtaaaatgaagatattagtaacttggtcatagggcacttatgagggattaaacgaataataatgtaaagtgctcaacacaattcttaccacattggaagcactcagtaaaggacagctgttattaagctattgtattattgctgtttgtatttataatcattattattttcattagagtgtttgtctagttccttgttagactcaaaacttggtaataggaaaaccatgtctttaaatgtttatatccctagagatgtctgacacatagaaggcagtgaacgaatacttatttaatggataaatgaacaaaaatataaagtattatttattatttattatcaaaatgtattaaaatgtatatggagtgctttctacacagtgggaaattaatacacacttattcctttcctgactctacttaactttccctagttatatcaaaaggtttttctgggttctcaatctcagtgaaaaggattgtttgtgttctcctcaccttttctggttctataaagggttttatctttttttaattttgtttctatgcaatggtcttcctaatcttccatcatttctgacttgttgggtgctaatgattttaattctttgtgttactaaaaagctgtttctgagtgaattccctataagtgtagatgccatgaaatagtattttctgggtaggtgtgtatgtgcatgtatgtttattctttttaataaaacaaacatcccttatagtactcccccctgccaccaccctcttcttgcaggaggagagagattgttaaaccaatgggcagtgagggtctgcagctccagatgcgacacaaggttgatgcagaagctcccactgagaatgtctggatgactttgggaagtgaaggcatcttcctgttgtgcctatttttcccaaaaggagtttagccaggggctaagacattttttggtagaacattgaaacctgctttgttctttctagccgtcaattccgtgcttgccatttgttgtttttcttacaagtgcagtgctttcttttccctttctcagcttgacagcttttgtctgagactgaacctagcttggcttttccatgtgtctggtatcctttacacagaacgtttaacttgatgcttttcacaaaggttcacacactcaatgctcttggatgccagctgggaggattctgttatggrgtaaagggggttaagtaagaaattatttacttctataaggaattacagccttttcattttctaaaacactcagtcctcttaacccatctttattttccccatttatgatcaaggctcaccaaaatgaatatttgtctttgatcattacttaggaaaaataacaatactattaagaagaagagaggtaattgacattaggcctcagagacaaggagactgtaggagtgatacaattgaggcaaaggataagagcagcctcaactcagccccagccatttgttatcttgtaggagtgtggtgccggtagggtcagagcttccagcattttctgtgaaatctctcgatttacaaatgttgaaaataattttaaaatgttaaaacacaaagtcaaccattactgtatggtccaaatgaaacagagcaatgggtcagatttggctcatgggtcaccagtgttcaacctctgccgtaatgcagtaggtgcacaatttgtatttttagatattcttgcatactcttttagttctgaacaaaaaacaagattacagttagagatgtctcatttctaaaaatcactcgaataccctctcaaaaagagaagactgtgatattctcttccgagtgagtttatagcaaaactctgaaggattctataagataaatgggttagttgtttttcacttagtactgaaggcttaaggggttttttgtgttcttcctcttgttttccatttggcatgtgctgcttatgctttaaaaaaaattaaactgacatgcagtggaaaaagttactggagcctgaaagttggttaatatcaattacattctcgtgtctaataacccatgcctgggaaatgcaacttgtttgttataaatacccaatgccaaatcaagaataaaccgctgctttgttttagtctgtatttacagcatcattttaactactttgaccctattcaaggaggtaatgaagagctgggtgccagtgatgttgataaactgtggcaatttctgcattgtgtccttatagctgcctctgcttcagcctctattatttaaattgctagtcattacagtcatgccattaactggaaatgccgcaagatgacacataggaatagggccagcaggacactgttagcccttcttactgagtgcaacattctgggatggctagcaatagttataaaaggaaaatgcacaaacccaactcctaaagcttgaatactcacgaattctttgcagtgctggtagggtgatttttgaattcccacttgtccatattttttagaccttagacccaaatcacaaataatattccaggctttaaaacatatattttatttttcactaaaatttaaaatatctaagcatagctcaggctggcttattcttctccatcaggatcagacgcagaagaatatgggaagaggaggttgttcagcctgggatgtggaatcaaacaaagtaattgtccagtcacttgactcttatgaataccatttttagaaaagtgcacactttattactatagggcccctataggccaagaagcctgtcagtctccattacttgattaagactcacagttaaggtagtccatgcatacaagtagcaaatgatttcttttgatctaacagcatacactccatccatcctgatctatctagggaacctcttacaaaagcagggcctctggctagttgttcaagacctacagggaggagggattggaagaggtctttgttgttcaagattttgttttttttagaaggcctcgaatttttagcaagatataatccattacagcacatgtctttccttggaaaactttgtctttgtccatagtttttgggggcctttataaaaaaattagagaaattgggtcctgttgtgcatgttttaagaggaggaaaaggtgcatttacccctttctttcttgttactttctctattaactacatttacaagccataaacaagtatatactgtgtatactaaatatgtatttggaaggtgagagaaagaaaagacttttttttattttttatttgttgaactctgctctctgtcatgagcttggcacttttgctttttgtatcacttacgatcctttcagataaaagtaatagaaatcctagttcaactgatttaaacaaaaattttaaatataaataaaaaaaatagggccatgccagaattcagcaacaacattatcaagtatcaaggtttttttctgtcttttatttctcccctctttcaggtgttacttttctttgcaggcttgtcctctaatggtccaagtttggctatagtgcatccagaaatcctcagtgtctgaaggccagaaacggcaatgaatactcatccttctgggtgtcctttgttttcttaaatgtgaagaaaactttttcagaacgaccctggcctccaacaattgtcccacttggtgattggccagaatttcaaaccataccctgaagtgatcccttgcaaggggaatgaagttaccatgcttgtcctagtctagttaagcttcaagccttaggtctgagtaggccccagcctcttgtccctgggtataggttgtgggcagtcaatacctgaataaaatcacaaagtcagatcctattagaaaggaaggggagggagaaataactatcggataggaatgcaacactcctcatttaactctcccaacaactctatcccaaaggtccagaacacccagagagaatgaccttacccatggtcatagagctagaaagtaaagagctgggatttgaatccaaatgtttctggctctaaagtcctggatcttggaagagaccaaatgagggggcatgaggggtgggactatctaacaggagagtgattgtgtcactagaatattccagggaaaatgtcaatgggtctgtttagctcacaaatcagtaataagttataaaaacaacatttgcattgagactatttagaaaatgtaggataacataaggcaaagaataaatatcccccataacttcactatctagccataaccactattaatattttggggtatttcatctttgtctttgtaaacacacacaccctgcttatacactcaaaaatatgtactgatcattttctgtgtagaataatatgccaacgtagaaatatatatggaaatacttattataaayatattggaaataggctgcatagactgttttatatcttgctgttccacttaactttatgtcatgtacatttttatacattttcctataaactaatttttaggaacattatttttaatgactgcatagcaatccattttatagataacaaaatatattagaaaggtttcttatttgtttctccctatttctctttatgggaagtaacactgtaaatgagcatccacacatgatatatctttaggcacatcttttattatttcatcaggatcaggatacagtctttgaaataatgggtcaggaaatatatgttttaaaattgtgaacattcaaagcatattgccagattgcaatccaagtatgttgtatagtctacctttccaacaacaatgtgtgagagtgtttggactctttcttcatggctcttagctaggaattttttttcttttctttttcttttggagtagatatggaagttatgtatcaaggccctgcattccacagataaattattgcttatacctatttgttatttctcaaggggattgctgagttcattatgcttcttgtattaattgtacaaggcaaaaatggaaccccatataagatattgagaaaaaccatcacaacttgtactgaaatcatatttgactttgtatctctacccaaattgaaataaaaacctccataagtgctcgtgcattgttaaaatattcagacaagttatttggttcataaataaataattttaacttttatgataatggagaggacgagaggtggtatgagactgtctgaatatgccaataattcactctcttgcagccaagataaacagcatcatgaattaaatgatagaacactggatgaggggctgcaccatcgtaagactgggcacttgttagggatgcatggatcctcaaaatatatagcatgtcaaagaaaattagtattatgtatttcagggggtacaaagagagatgctctcaaaaggtgtcctgggaaggggcaattagaaattgttgtttagcaacatattggttatgaagagaaggagcagaaggcaggaagcttatgtgtacaattcagttttgcattatcctgggtagagccaaagagactgaattggattctaataggttagaaagacaaatgaattagaagcagccaagatctgcaaatttccacacaagtctgtccatttccacgggggtcttttgagtgattttcactgccatgccaagtgttttcagtgacctactcaaaactggaggaggagacacagtacgttgaacatctacctcttctctgagcttcatttcctgctctgggctccatcctctggtcctcatccaattacctcttgctctgacataccgaagcctgccttttaatgccaaaatttattcattctttcacacatcaaatagtttattggctaaattctgtgtacctggtaccatgccaatcaaaatggtggttcctggtcaggaacgacggctcatgcctgtaatctcagcactttgggaagccgagttgagtggatcatttgaggtcaggagtttgagaccagcctggccaacatggtgaaaccccgtctctactaaaaatatacacaaattagccagccaggcgtgctactcagaaggctgaagcaggagaatcagctgaacctgcaggcggagattgcagtgagccgagatcgcaccactgcactccagcctaggtgagactctgtctcaaaaacaacaatgacaacaacaacaaaaccaaaatggtggttccccatcctgcttatctgattggcttatctcactagagtagtgtgcacttagatctgactgaagcttgattctcctgcaatcttcattttgaagaggactttgttcataattctttatcatttaccacagttcttcctgaacatatactatgtgtggggcactgtgctaaattctggggatacgaagagtttaaaatcacgcaatgctggttaagaaaggatgctattcttgaatgtggagttggttagtactgcctgccactctagattatctcttctcttttaatttttgaaattacttccttaatttggttgggcaggaattaaaatacagagaacaatacctagtttactgactctggttagtaactacatatgctaatagactcaggaaaacagggttatcacctaccataacrgtccttaatcatggctacacgttagaatcatctgcgagatgttgggggaaaagcacaatgcccaagacatgccccagagcaattgcttcagaatcactggggtgtgtgacctagacatcagcgctttttaaagctcctaagatgatttcaatatgcagccaaattgagaagcaccaacctagaaagtgaaggtgcattgagttaccacctttccccttgtggagcaacctttactcaagcatttttccaggcagcccaattccattatatgtgccacgaaaaaaaccatggctatcattttcaagaactctgccctccttcttggagatttaaagcagacattcgtattttaaaggccttcagggatcttgccattaaaaaataaaaaagaaaaacctgttgaattctagtagaattctctattaattttgattcaggattggcttgtgttttctccctctttctctcaaccaagaatttcactgaatatatctgataaatggccagagtatgcaagagctgattaatctagtcagggagtgatttcagtttttgtttctctattctctggtcccccttgctgcctttttctcattactttttgagtaggaaaggggcccactgaagaggtaaagctgcagtcaaccagtttgtkaaaagctttcattgactttccaacaatgtaaaataaggctacattgtggaagagtcttctggttctcttattttctatattggtggttctcaaagtgtgttccctaaccacagaatcagagtgaactgactggtgtggtaggtagaatyatgcgccctccccccaaagatatctacacccyaatctccagaacctgtgaatatactatcttacctggcaaaacagactttgcatatgtgactaagattacagaccatgagatggggggattctcctgaatacctgggtgggcccagtctagtcaaatgagctctaaaaatcagagaaccttttcaggctgcaatcagaaagatatggcgatagaggaggcaggtgagattcaaagcatgaaaagaacccaacccctcattgctgacttgatgatggaaggaggggtcaacctcctaacaaatgtggaaggcctttagaaattcagaatgaccttcagctgacaggcaataaggaaacaggacttcagaactgcattctgccaacaaccggaatgagcaaggaaacattcttccttagagactgcagaaaggagtctgcttacaccttgatttgagcttggtgcgagttgtgtcagacttctgacccacagaatagtaagataatgaatttgtgttgttttaagcccaaagtttgtgtaaatttgttctggctttattcggatagtaatacacctggtaaattactgaaatgcaaattctcaggcctcaccctacacttacttaatcagaaactctgaggagggggttgtgcagtctattttaatgaattctccaggtgattctgatgtgctgaagtttgagaaccaccattatacaataatagaattcccaaatattgagtaggaatatagcttcccagaacaaagactgcatttcttacttttgttgcaggtggttatggccatttgactaagttctgaccaaacaggttgttcagtaaagggttaactcaaggcttggggtgttcaaattctgcagataccaaataaaagactggcccttgaccatctccaaagagataaccttggagcttttgaagcaccctaactgagaaaagtgcctttgaatacctgaaactgtgggtcttgccagatagtttatactgacaatgtgattgttggtgaatgctgtttctgttcacctgaagccctgggctatgttgtatcaatttgacctctggggggactggagactgggtaattaaggtcattcgtgtgggaagtccatgtctatgtggctgacccccaataaaaatcatggacaccaaggctcaggtgagcttcttgggttggcaatactttatacatgttgtcatacatagttgctgggacaattaagaaccagctgtgtgattttactggtagaggacactgtaaacttgtgcctgttttctcctggattctttcctatatacctttttactttgctgattttaatctgtgtcctttctctgtaacaaaccatcaccatgagtacatagtttttctgggttctgggagtcttttagtgaatcattgagtctaaggattgtcttggggactcctgatgcatagagataataagaaactttatgagcaactttctggacattttcttgtagcaggtgcacagtgccacattccctatccccacctaatttcattgcagctgtggcagatgctgtcatgtgctgccagggtcctcaagttctgctgtgctgtacatctactattctggtttaggccttactcaaaaccaaaagaaggcttcccagcccacgcacaagcatagccggggaagtaacagcactacaggcaatgcttaaccaattggtgggttgccacagccttctatcagatggacagttgtgggtacattccacacagctcctcacatagcaccccaggtgttgataacacatgctgtttcctttttccttccagtgtttactgtctcatctctttctttcaaattttctgagatcaccatccaaataatctacccaaacctatgcccttggtccttgtcttaggctttgctttcaggggtacactaactaggagaattcttaaagagaagatgcattacagcttcctccttgctgccaactggggtgcagacataacggctcattaatactttttgctgttttcttgtttgtttgtttttgtttttttgagacagagctttgctcttcttgcccaggctggagtcaaatggcacaatctctgctcactgcaacctttgcctcctaggttcaagcaattctcctgcctcagcttcctgagtagctgggactacaggtgtatgtcactacgcaaggctaattttttgtatttttagtagagatggggtttcactatgttggtcagactggtttcaaactcctgacctcagatgatccacccaccttggcctcccaaagtgctgaggttataggtgtgagccaccatgcccggcctttttggctatgttaagaagatgaatgctgtgttttgaatgtgtcccccagagtttatgttttggaaacttaattcctcaatgcaacagtgttgagaagtgggttgtttaagaggtgattagggcatgggggatctacccccgtgaataaattaatgtcattattwtgttaatgggttcactattgcaagagtgggtttgttatccaagtgagtttagtcacttcttgctcctttgcgtgctgtttctcatcatgtggtgccttattacatgtgtaacacagcaagaagtctttcacaagatgtgggcccttgatcttgggcttcccagactccagaattgtaagctaataaatctctgttgtttataaattacctagtctcaggtcctgttatagcggcacaaagcagactaagrcaktcaccctctaggaatggagatacagtaagttgaaggcatctaggtctgtaatgggtctgtagaactgccatgtcagcactagactactgatctccaaacttgttaaatgagagaataaaagcttgtatattcaagcttccgttcatttttttttttttttgaggtgggaggtagtgaaagagtggttcacattcaacttaacctttttctgactagtacagcaactaatggctacatggagagtttgatttattgtcaagttgaaattaagttgtccctgatgtttatcatcacaatgattaagggttgactgcctgagggacaagcatgttagttttggggaagcgcagtagactgagagtccagcaacttggattcagtgttcacccctaagcagctgtgccatttaatttctcttggattggaccttcttgatctcagggtcacttttgatttttatattccatgattctatgatttaaagtattatgaaattcacatgcaaaaacaaaacacttagatcattatgaaatgtaaatgtgaacacaccatctatatttgcattttgagatttcctttctaatagaatgatgagcacatcttagcctgtgtgtgtatgtgtgtgtgtgtgtgtgtgtgtgtgttgaaaatgactcgtgagatagaagccccttgagacattattaaagttgatcacattactcactgtgaaaactcaaactttccttgaatattggaagctgtttacaaaactctgtttacctgacagtgattcttcaggctaataggaatcttcatgtgtcttttttttgtttgcctggatggtacccaatcagtctatataataagacaggccaaaggacagggaattatgccccaggacactctctgctctgtcatttggatttgcatgcagaaatcataatttatggtgtgatcaagaatgatataagttggcagtataatgagcttgggatgttggatagcccagatgtacaccatgacctttgctggatggaagtgttagacttgggcacatgcatatcagttgtgggtaaagactctcctttggggagtcaagggtcatgaatttttgtctctaggcagcatatacacagttgcctggcaactgtgagagcaatttagtccttgctatatgatcctatgaaggatttcatccatcttgaaaagctaacagcataatttaaatttttgaagcagcgtgtgggcgttctcaagtggcagagccttatctcacatctagttgcacactctgtgtaaacttgaagttttcctgcatgaaggatgctgtaaacaaaaagctagaactctgaagtaaggttgaaagtgagatccttcattagaatgtattcagtatgaagtaacagaacacccaactaatagtaccataaatcacaaggagatttactgtttcctatataagaaacctcaaattaagtagtctcagtgttgatttggctgctaaacaaggatccaagctcctttcatgctttcattccaccattggcggtgtattggccttaatccttagacttgttacctcatgccacaaaatggctgccagagctttcaacaccacagtgtcctggattagcattcaacacaggataggagggaagggagcaaaaagggccatctcgtggtgggccyctctctctctttccatttcargaaagaaaatctttccttaaagtstcttagcagatatctttckatttctctttggctagaactgagtcacacatgcatcccatcccagaccagtcaatgtcaatgaagtattcagttaccttcactggctgagaccagtacgtttcagcctcttatgctgagagtaaggcctatcttccctggacacaytaccacctgcaggtacctgagaaagatcaaggtatgttagcaaggatgaaggactgatggctgctggraaagcacctcacactgctgctatacttctgtccatgttaatgcttatgtgtggaggtcagagggaactaagtcatcstcaaagtgtttttaaacatgacattgaaatcataatttggaaatagaaacattttgcattaaaattggattttttttcttctgttaaaaaaattcatagatttggcaacatttgaaccacatacacacatgagagtattgccttcttcccttgaggcatgtgtttcagtttaccacgttcttcaccactctttctgtcatgcacttggtcctctttactcatgtatgttaacgtcctggcccccatattcatttgtgtttgtgaaccttggtctagatcctttttagtgacatgcagacattatgaaacaggagtcttacagtcagactggcccattatgctccactgtgccaactgccacccttctctttcatccttcccatacttgggattgttttgctcttctggtatatatttttaaaattttatgcctgtagaagggagtatagtgcaatggttaagagcatggcttttgacataatacataagtggtttgagccccggcagtatcacttacgaacttgtggccttgtattcacatctgcagaattaaataataatggaacctacccgatgtggttgatttgagaactagtacatggttcacttaaaactaatcttttttttttttgagacagagtctcgctctgtcgctcaggctggagtgcagtggcgcggtctcagctcattgcaagctctgcctcccgggtttacaccattctcctgcctcagcctcccgagtagctgggactacaggcacccaccacacccggctaattttttgtatttttagtagagaccaggtttcaccatattagccaggatggtctcgatctcctgacctcgtgatccacccacctcggactcccaacacttaaaactaatcttgacgargatgatgaagaagaaaatgatgacatctctacgagtctgtgttaatgatatcagttagtcctccaaggcgccatttggaatgcgtagcacagcatcttcagtgagcagagctgatgaatagcaactatgtatcccgtggagctagaagaaggtcctttgagtgaccacatgcttgaggagcagtaatcacctggaataattttttttctgttcctttaagagatagaatcagatccacttaattcatggctccaggtaaccaatacagctccaagaaattcagttctgcactcaagatttgctcatttctattcatctgggggcatattctgcatttatactgtccaaaagcagtggatattttagtttatgcctggggacatgggaaaccattctcaatgtctctactgacgttggagagtcacagtttccataccaaaaactctttttttattctattcttattttttggtctaggtttcaagagattcatccatttgtaactcaatctagagatataagatcgtataaatccaataaattatatggaggtcagcatataaatgattccagaagagtcatttgggaggggcaaaaggatattttgagattgggtagttgctttattttactctccagataaagtagatcctagtaaattaggttaagggactcttagggacctcattataacctcattttttaaataattaaactaaaaatatcaatcagttggttaggataataagcactatgggcaaaatcagggggataccctgttgtggatataaataaaaatattatacttggattgggaagtttggaactattaactatttgaaatattttgacatagaaattccttgaaatgtctagtaacgtattctgtagatatatttgaccaagtagctaaagaggttcaatatagtattatatatagtattataygtctatacattgaaattactctgcagccattaacaagcatctctatgaattgacatgaaaagatgtcaaacatgtgacagaacagtatgtattatagaaacttagaaaaatatatgtctgtatgcaaaaatgtacatgccaaattattaatataggctccctcagggaatgaaattgtgtggatatgagggtagagggatgggaaaaagaagaggaggcaaaatgtaatctttgatttatatgcttttatacatgttttgcaataacgtgtaccttgtaattatcattttatatttgagagtttggaatggaaacrtagggagttacaatattcctcccgagggacaatgtcatgtggaagttaagaacacaagctctagagccatgatttgcctggacttgaatcctgcctgcatcattgctgagctgtgtgttcaagcaagtccatagacttaaaaatagaattaaataaataaataaaagtagaattagatatttaatttaaatttaattaaaacaaattttaatttaaatttaattaaaataaataaaatagaattaaaaatttaccctaggcatccagagtctagggttagcaatttatgaaaggtgaagatattcttttgatattaaataacatatatatatttaaaaagtgaaactttgagaggagacaagtgactggatagataaagatgagaaacacagaggcacttacctgtaaccaaggcacaaagtccacagccttgaactaaacatatatcacaacaggaacacaaaaccaaccgactgaaactagcagattgggagactcaaaggaggggggaaaatgtttcataaacttcaatcatctcacttyttcccagctagtcttctaattcttcaccttatctgttctctcctgacaacaagtcctgtatttaattcagattttatctctttgtgggacagctgattcgacaattatatatagttcatcaaagggctggaacattctgcagaatagtgaaacaagtcacttggaaatgggaagacatgctcaaggatgaatgcatcaaaagaagctactataaatgaatcagtaggagtgaggcaaaaacaatcatttggtagagaatgcttaggaaaccagggtaacttgacctccaatcctaagacttaattgagctaaggaactgagtgctgcaggatcatgctctgtggttgcttagatgaaaagccagccaggctgtaagaacagtgactgattgacattgacagccttccatctggagcttaatctgtccgcatacatctgtgacagtgttgtgtctttcagagcaggttcatgtaatactgaaggccaaacatcaagcaagaagccaaagtctcagtcattagtcacacatttgggccatagggcaattccaggacattgcctttacttgcagctggagaagatatgatggcccataatgtggtacttaatgaggagtacacacagatgacagggctaaactgcagcagcaagttactgctaggaaatagctccagcttaggggagtttccctctgtgctttttcccagaaagctgctggctttcttctctgaaacacagatatgtctcctgattgactgtcgtcatagtagctcattatggttttgggtggcagcctgttcagctatagtaaagtacagtaagtccttacttaatgtcattgataggttcctggaaactgggacataaagcaaagcaacatataaccaatttcaccatagactaattgatataaataagagttaagttcctatggcatatttctggtcacaactataccrtcaaacttctaaatagaccaaaacactttgaatattttacattgaaatctatgcgaactatatacacatttaagaaagagtaataaaaacargtaagataattatttatattccagttgagggtctcggatggctgcagcatgtcccagcagctcagggtgcaaggtgggaactcaccctggacaggacatcatcccattgcaggacccactcacctacacacctacacacacacactcatactcactaagatggggaccatgtagacatgccggttcacctaccatgctcatctttgggatgtgggagaaaacttgactgcccagagaaaactcatgcaagcatggggagaatgttcagaccctacatagacaggggccccactgggaatcaatttattttctrtcggtgttayaaccagatggcattgaatgaactttatagcaatgcaagaatggrctaatgcaagaacgacgttgaggacctgtagtgcagagctgcaaagtgttcaggttgttccctgcccttgatggcctgatgactagtgtctccttgcctcaaagacaatcatcagttgttttctttgaaggaggtttgagggacctgaagtttccttgaaacacttaaggtctccatttcctcctactttaaagagaatatgtggccattatttacaaatgaaaatactgctcagatgaggtaatttaagaagagaataaactttggcagactctcttttaaaaaagcacaagaataggtgtaaccagacaccccaaattaacagattttcttcagtttatgggtattcaatttatctcactgctttctggcaaaaaaaaaaaaaaaaaaaaaaaggaaaaagcaaagaaaaaaagccacattgaattaaatggctttcattatctgtcaaaagcaaagcatacactttttttgagaataaaattcacatgtgaattactttagttagctgtggtcgatgggatactgtgtaaaatgttggacagtgttttcaaattgtttcatttaccatttacgaaagttactataactgttcaaatggacgattttaaaattgactttctatcttagctaacagcataacaaatagtagcttagggaaatgcttagttgggagtgaaacatcctcattttctagggccagacattggggaacctggaggaataaacaattatgtgaccagcagttcccagagttcctctttactggacacagaggaaggacacttgtttggaggagtagagtcttgtggtgattaagaaggtagattctagactgggactacttgacctcaaatcctggctgcatcatttatgagctgtatgaccttgagcaagtccatcctcttctctggacattgtttatttgtaaaatagggacaataatggtacctaccatgtaaggttgttgggttatgctctttctgtagacccatctgcattagtccgttcttgcattgctataaagaactacctgaaactgagaaatttataaagaaaagaggtttaattgactcacattccacaggctgtagaggaagcatggctggagaggcctcaggtagaaggtgaagaggaaggaggcacctcttacatggtgggagcaggagaaagagactaaagggggaagtgctgcacacttttaaacaaccagatctcactcattattgcgagaacagcaaggaggaagtctgcctccatgattcagtcacatcccaccaggcccctcctccaacactgaagattacaatttgacatgagatttaggcgtggacacaaatccaaaccatagcactattcatatctttcctccttaggaactatattggggaggggaatgaatgagaatgatgttatcttaccgaccatctcaaatatactttacatgtatataaattattggaaactatcatggaatatgtaaaatgtggagacatcatccagggctgtagagttgagtagagcagtttgttgtgccatatgtggagactcatgcttatataatcatagacctatagcatcataaaactcatggctcacgtttatggagaacttattacgtgccaggcagtgttctaagtggtctatgaggattatctcagtgaatcctttcaacaactttgtaatgtaggtgttgttttgtcttttttttttctgtgatattaaagaacttgctaggtctcagagctaatctctgttagaggtgattcttgaactctacccagtttgatttcagatgccagctctcagctgctacagtgagaagttttggagggttctgtgacccaaggagccttcctcaccaactgcctgagcttttcagatagtcgtcttagctcttgtttacatttgttggcatagaacagtgttgtgttgtgagaaaaacttttccttgcaggtgaaataatttagctggatttgttttgcatttttagtgacgcttgactcctcatctggctctgtgtttaatctgccacccgagtgcagtgaacctttcattatagcttcttcaccctctctcccccgccacatactttccacatttaatgttccaatggcctgggtgttctgaaggagaattaaccaacatgtaacataatttatggcctttacgttccttggtgttcagagaataataaaagttacagtcattaggtatatctgatttgtgattttttttttcctaccaaagatattcatctcccttctttcctgtacttactgtgtgtttcattggaaaccatccagagctatcacctggtcatggttctggaaaacaaaggccttttccaccaccagctttcactgtgaccaaccttgagtaacatatggatgccattccaagggaaaaaaaagtcttatgaacccccaatgttaacttaatgtttttgttattggattattgaaccacatgaaaatacaaaagtaggtatgaatttctttgtgtggttcttagacaaatatgaaaccataacacgtttacaaattacatgcaatcaaaatgacaaaactaaattcaaatgaggaatattgcattaacaagatgaatgatattatttgtttaaacagaatcatctctggaaacatcaatacgggatgtctgttatgtcaaaggttctacacagcttgtcatgtttgtgttagcctaggctgtgtgatgactcaatttccctaacacttccagctgctattactgggacaattcatatgtactccacccctactctgagatcatgaggcacaaacacattatttaagtagtaagtttgttttttttatcttttgcttgtgacagctaaaacagcaatacctgataccaccacaattataaatgcaaacataaaggagtcacaaaacttttgtgctggtacccgtattttaggtgctatgtagctgatgcagaatacacttgaactattttaagtgagtattatctaaataaaaccaaaaataaaaagtctcatcaagaacattcagatccctaagaacatgctcagagaccccagtttgaaaaaggtgtgggtcatctgtccttcctctgtggagaggattgctgttctctgttgggaatgcacttcccaaggcgtgttacatggctcactctttcgcttcattcaagtcattgttcagtgtcattgacatgggaaggcctcccctgaccaccttgtctggggtagcactctcatcagcttcgcttcttactctgccctgttttttcagagcactcattataacctggcattgttgtttgtttgctttcacctgtctccacaattagaatgtaagctgcattgagaatggacttaggtttatttatgcctcacacagtaggtgacaaagatctattgaaccaaggaataaacactcttgctcttcaacctcgcttccttttggctgggtccctaatcccaatcttcacctgggtaaagactcatttttttccctttttgtggagcatggtgtcttgctatattgcccaggcaggtctgaaactcctgggctcaagctatcctcccgcctctgcctccctgagagctgggattacaggcgtgagccatcccacccaacaggtaaagactcattttaaaaactgtccccactgaaagattaatggatacaaaaaatagtaagaaagaataaataagacttagtattttctaacacaacagggtgactagagtgaaaaacaatttatctgtgcattttaggataataactaaaagagtttaattatttgtaacacaaaggataaatgcttgagrtgatggagaccstaccctgatgtgattattacacattgcatgcctatatcaaaatatctcatgcaacccatamatatatacactatgtatccacaaaaattaaaaataaaacttaaaaaaaatacccccacttaagcctacattctctctgtccctcattagaacacctagaatctgtattgggactccttttatgtcactcatggattccacctcatgatattttttcttcacttttatctcttctcccagatcctgwgctccttgaggacaccatctgtgtttgattaaccttgaattcccccagtatctggcatgaatgcagaaatgtggttatacatgggaatcacccagaaactgtagagtacttggttctaaatatcattcacttctcttccacagtatcttgcagaggggctagcacgtggttggagcttgatgagggtcagtggatagcatatggtgaaaaacactataagctttgggaactgaattctctatgactaacctgatgttaacactacagtaggagaaattaaatttatttcaactgagtttttctcatctctattatggacgagaccctaattaggcattattgtggctacaatgagcactgtattacctttgagttcaagtttagtggagaggacagatagaggtagggagagacagacagagatagtgtttgttcattcattcatccatgcattctttcttcagatatggagcatcatgtccttgctactagatttaggaaaactcaacacagaccttgtctaaagcctagccctagtggaaaagagacgcatcacagatgcctttttttyctgaaaaacaaacaaacaaacaaacaaaagatactaacaacaactgtggttagtgcaacaaaggaaaggaatgcagaggtatgcaaatgcacgtgtaatgtgccctgttccaaagcagggaaggttctccttgaggtataacgttgaactgaaaccccaaggatgagtgggccctaaccagggagagcagcagaggaatagcatgtacaagggggtctgaaaagtaagaatgtaatagagggaccccaaagtgtcccaggggtatagggtgtgaaagagtaatcctggctataggtctggaaagcttcatagaaggagggttttgactgggccaacaggtcattcttaggtacatggaagaggaggagacagctgtccatccagaccaggagaccagtgttctcttaggcacagaggtagaaatgtctagatctggcttgggaactgtgcagggaagggaatggctaaattgcagggtttatacagaacctctctagtagaatarttatattgatgaaatacagaaatatctgaaaaccatgagtcacaaatcaaaaacattggttggtcaaaaacgaaagcttgttatgtttaaaatgttactgtgtataaacaatcagcaaagataattcttagctgatgctactattaacatttctatcaattaaagatctttatcattagcactgtatgtcacccttttaaagtaatttatcatatggaatcacagatgcctttttttctggaaaaaaaaaagagataatttgttacaaaaacattacaaattatattgagttgacatcactcaattatagctacattactgaattacacctgttcagcccagagctggggaatttattagcacaacctccattagagctaatgggaaatacagttccagtgctctttgaatccactgcataatctgtaagaagtgtttttcctgttgggattgttctctggccttgacaaggtgagccatgaagacttcatttcttatgaagtytggggataccacaccagtgctgtttattcacacaggctgtgacatcagggactagctgggctgtgagagcctgttcagacaggtctcttcaagcctctggacagatgaccctgtcatcagctgctcctttcccagcgcttgcttacctgcattttagttttcattacccagccattatgctcactgcccacagtcacctctgcttattgatttgggacctgtgccagtttctaattgtttcctttagattgggttcgctccagattgctgattcttgtctagtaatttctctcttcyatattgtgcctttccttgccctcctttactaatttcctgagtagccagagaagctatgggtttgacccatcaactcataccaaggccatatgagctatggtgacttaaaaaaaattaacttgaaactttaaacacaatttttttttttttcttgagacggagttttgctcttgttgcccaggttgctggaatgcaayggcacgatctaggctcactgcaacctctgcctcctgggttcaagtgattctcctgcctcagcctcttgagtagctgggattacagccatgcgccaccacacccggctaattttgtatttttggtagagatggggtttctccatggtggtcaggctggtctcaaattcctgacctcaggtgatccacctgcctcggcctcccaaagtgtygggattacaggtgtgagccaccacacccagccgaacacaatttttttaaaaagccccaagaatcattaacttcttctcccatcctctttttctttccaggacattttttttatgtatgtgaatgtattgtgggcatcattcttgttatttacctgagaacttctcaagaggcatggcaggttgaagaattccatgtgtcaccatatatttgagatctcttaagtacattttttagtttcccaacagccactcacttttcagggtggatttggaagagagtccttccctgcagtggatgggaggcgggggcacctggtgcttctagtcctcattccctggtttcattattattcattgttcccttggtaaggaaacatatttcaaagtttcacattttctgttaatatttatcaaaataccacagcagttgtatcatacagcagcagaaaatttcacaagttctttatttttgttgactttggaacctatgtctgatatcttgatgaatctttataggaaagaagaaaatgctaaaagtcatcttcatttaaaaaaaaatagattaattaacatctaaaagaattaccagcctctcaataggtggagggatcttggaaccttattataaatgtgttcattctaagcatggatctaacaataaagtgtagtgcagcactactcaaagggtggtccttgtcctggtgccagtatgcaacaaaataagtatataaattgagagtaaggatttagaaactcgtgggtaataacagcgtaaatttgtctgttgactccaataacaacttttgacttttactttgaatgcctttattccccagtgattcattttcattgcactttgtaaaagtattgatctgcgctagactgcaggtgggtgtggttggcaggaacaatgctgatcctccatcacagttcattcatgtaacacttgggtatttaggtgaaaaacacaagccgcaagcaccgatttttcatagccgtgggtgtgagtcctggatatgctatttaccggctgtcgaacttgggccaattagcaagtctttctaaaggtcatactctctatcctgaaaatataagtaaggtggtactgttctttgcagggttgctgctaggattagttgagatgttataggtacatctgcagagttactgcatcagggttcagccaactttggcagtcctgggaagaacacgagtgtggtacttggtgcgtaataaaatttaataaatgtttaccatgatttgcttttaagtagaatttgtatatgccttatagcctctctgagggatattgggaaacaaaattcagtggtagcctcatttaggtcacacatttacaaacctctctcaggacatggacttgaaggaaaagtttatgtttaggctccaacaaaagtcttttctcaaagattatatctttactggttttctccatcttctatcttctgatggtgtgtggaaattactagaatatgtgtatagagagcagctccagggaacagatgtgcattcttactcatcattagatgcagtgtaacttttgccctgcctcatgaattttgactctactttggaaaaatagtcacacacaacttcttgatagagtttccaaaattagcttccagaactttatacagaagggcacgagactccccacatctctttgcatgtgttatatttcttttttggcttaaaatttgcatatttattattcatgcaacaaacatctatcagaaacatttccagggcctgtcatttgccaacccagtggtagttgccgtagcttctagaaaaatggaagtattttagccagtgagatatgtcagtcaaaataacccaagaagccaggggtggtgtctcaggcctgtaatcccagaactttgggaggctgaggtgagcagatggcttgaggctagagttcgagatcagcctgggcaacatggtgaagcctcgtctgtaccaaaaatacaaaaattagccaggtgtggtggcgcatgcctgtagtcccagctatttgggaggctgaggtggaaggatcatctgagcctggggagtgcctgccactgcactccagtctggacgagggattgagaccctgtctcaaaaacaaacaaacaaacaaacaaacaaacaaacaaacagagatagtggtacttacggagccaaagcaggagatgccttgtaggtattcagaaaatctcattgtcatagacatttttattataacttcatctccaggtctctttcttcatagatttttttaacgcacatttttttcacattttaatctttgaaattgggatatatgtcataattgatagtcacttataatcacttcagataggtagcagttgggacaactgttgtttgtctgcacgtgtatgagtattgaaagggaagcatcaaaactcacaaaataggtgtctatggctcggaagaaaatccaaggaatagtattggagcattcttagaagaaatatctgtgcacttgatgacacaaaggagggcaatgtgcaggctgtagtgatctgcccagtttctcccagctggaagtgaaagggctggtccaaccaatgtctgactcctatcttgtgccttaaaaaactgtatcttggaaaatttcaaatatacacaaatgtagaactaatagcataatgaacacccatgcgtgcatcatccagctttaataattatcaatatcttgccaatcttacttcctctgtccccattttattttttcgttctttcttttcttttgcttgagcgcattaaagcatatgctggatatcatatcttgtcacctgaaaattcttcagtagatatctctaactgataagggccttacctcctttatttaaattccatgccatcatcacatttaatgaaattaataataattccttaatattttctaatatccagtccatatttgcatttccctaattgttcttttgttgatggttttgttcaagtcagaatctaaaagagattcacacattgcattgaattgttatgttgcttgtctccttttttttaattagtcctcttatccccttcctctcaataactttgatttgtgagagaaactggatcatttgctctatattttgaagatggctgttcgcttttttgtggcagtgtttaatttatttctctgtatgggaaaagaaataccttttattcccatcctagttttatgatggaagccgctataacaaaagatagatttacaagagaaaagcaaaccgatttatttaatataagtttcatgtgacatgggagccttcataaggaaatgaaggcccaaagaaatggttaaaccgtgtactttttatgctaggtttgatgaagagtgggaagaggtgaagtatgattggacatatgattgggagtgtgatctaatggtaataaactgggggagggaacttagcaaggcctgtttgttcagcttcttctctgtgtccctgtgtcttcagaggtaaggatgttcctttcctccatgtataaggagggcacctctaaaatggtcttatgacctgctccaggggacgctcaaaaaaatccttccattggttcatgacctgcttcaggagagaacggcagaaggtgagagtgaccttcccgcttctgctgttttcttaaataccaaggtgtcatattttaggaaagcatgtcctgaacccaatcaccactataacctggtatttagtctggagtcttggctagattttatagagattttttaggcaagaatacttcatagatggtgctatgtatgtcctatttcatcacagcatgaaggaaataatgatatatgtccttttagtgaagataacatgagttagttcattcaggtattgtcagactgttctgttaccaagttccctatcatgcttacactgatggttttatgtccactcatagtagtttcctatatctggatataggtcttatatcattaggggatgcaaaatagcagttttctagttgtgtcatttctcctgcatttattcatggagatctataaaaaaactttttcttatcaaccatttggttactctgatatacagttcacataggcaggaaattaattgttatacaattataatttttaattaatgaatgaaatgcctaataacttctatttggtaacattggttaccaactagaagttattaggcattcattcattaacgtctaatgagttttcatgcatgtgtcattatgaagttatggattttaaaaatatatatacatatattttaattatgctttaagttctacggtacatgtgcccaatgtgcaggtttgttacatatgtatacatgtaccatgttgatgtgctgcacccattaactcatcatttagcattaggtatatctcctaatggtatccctccccactcccccaaccccacaacaggccctggtgtgtgatgtcccctgccttgtgtccaagtgatcacattgttcaattcctacctatgagtgagaacatgcggtttttggttttctgtccttgtgatagtttgctgaaaatgattgtttccagcttcatccatgtccctacaaaggacatgaactcatcattttttatggctgcatagtattccatggtgtatatgtgccacattttcttaatccagtctattgttggacatttgggttgcttccaggtctttgctattgtgaatcgtgccgcaataaacatacgtatgcatgtgtctttgtagcagcatgatttataatcctttgggtatatacccagtaataggatggctgggtcaaatggtatttctagttctagatccttgaggaattgccacactgtcttccacaatggttgcactagtttacagtcccaccagcagtgtaaaagtgttcctatttctccacatcctctccagcacctgttgtttcctgactttttaatgattgtcattctaactgatgtgagatggtatctcattgtggttttgatttgcatttctctgatggccagtgatgatgagcattttttcatgtgtctkttggctgcataaatgtcttcttttgagaactgtctgttcatatccttcacccactttttgatggggttgtttgatttttttcttgtaaatttgtttaagttcttggaagatttctggatatttgccctttgtcagatgggtagattgcaaaaattttctcccattctgtaggttgcctgttcactctgatggtggtttcttttgctgtgcagaagctcttgagtttaattagatcccatttgtcaattttggcttttgttgccattgcttttggtgttttagacatgaagtccttgcccatgcctatgtcctgaatggtaatgcctaggttttcttctagggttttgatggttttaggtctaacatttaagtctttaatccatcttgaattaacttttgtataaggtgtaaggaagggatccagtttcagctttctacatatggctagccagttttcccagcaccatttattaaatagggaatcctttccccattgcttgttttttcatgtttgtcaaagatcagatggttgtagatgtgtggtattatttctgagggctctgttctgttccattggtctatatctctgttttggtaccagtatcatgctgtttgggtagccttgtggtatagtttgaagtcaggtagcgtgatggctccagctttgttcttttggcttaggattgacttagcaatgtgggctcttttttggttccatatgaactttaaagtagttttttccaatcctatgaagaaagtcattggtagcttgatggggatggcattgaatctataaattaccttgggcagtataaccattttcatgatattgattcttcctatccatgagcatagaatgttcttccatttggttgtgtcctcttttatttcgttgagcagtggtttgtagttctccttgaagaggttcttcacatcttttgtaagttgcattcctaggcattttattctctttgaagyaattgagaatgggagttcactcatgatttggctctctgtttgtctgttattgctgtataggaatgcttgtgatttttgcacattgattttgtatcctgagactttgctgaagttgcctatcagcttaaggagattttgggctgagacgatggggttttctaaatatacaatcatgtcatctgccaacagcaacaattggacttactcttttcctaattgaataccctttatttctttctattgtctgattgccctggccagaacttccaacaggattggtgaaagagggcatccctgtcttgtgccaggtttcaaagggaatgcttctagcttttgcccattyrgtatgatattggctgtgggtttgtcataaatagctcttattattttgagatacatcccatcaatacctagtttattgagagtttttagcwtgaaggcctgtcaaattttttcgaaggctttttctgcgtctagtcagataatcatgtggtttttgtctttggttctgtttatatgatggattacgttttttgatttgcatatgttgaaccatccttgcatcccagggatgaagccaacttgatcgtggtggataagctttttgatgtgctgctggattcagtttgccagtattttatgaaggatttttgcatcgaagttcatcaggggtattggtctaaaagtctcttttttgtgttgtgtctctgccaggctttgctatcaggatgatgctggcctcataaaatgagttagggatgattccctctttctctattgattggaatagtttcagaagcaacggtaccaggtcctctttgtacctctggtagaattcggctgtgaatccatctgggtcctggactttttttggttgctaggctatgaattattgcctcaatttcagagcctgttattggtctattcagagattcaacttctttttggtttagtcttgggagggtgtatgtgtctaggaatttatccatttcttctagagtttctagtttatttgcatagaggtgtttatagtactctctgatggtagtttgtatttctgtgggatcggtggtgatatcccttttatcattttttattgtgtctatttgattcttctctcttttcttctttaccagtcttgctagcagtctatcaattttgttgatcttttctaaaaaccatctcctggattcattgattttttgaagggttttttgcgtctctatctccttcagttctgctctgatcttagtcatttcttgccttctgttggcttttgaatttctttgcccttgcttctctagttcttttaattgtaatgttagggtgtcaactttaggtttttcctgttttctcttgtgggcatttagtgctataaatttccctctacacactactttgaatgtgtcccagagattctagtatgttgcgtctttgttctcgttggtttcaaagaacatctttatttctgccttcatttcgttatgtgcccagtagtcatttaggagcaggttgttcagtttccatgtagttgagtggttttgagtgagtttcttgattatgatttctagtttgcttgcactgtggtctgagagacagtttgttataatttctgttcttttacatttgctgaggagtgctttacttccaactatgtggtcagttttggaataagtacgatgtggtgctgagaagaaagtatattttgttgatttggggtggagagttctgtagatgtctattaggtccacttggttcagagctgagttctattcctggatatccttgttaactttctgccttgttgatctgtctaatgttgacagtggggtattaaagcctcccattattattgtgtgggagtctaagtctctttttaagtctctaaggtcttgctttatgaatctgggtgctcctatattgggtgcatatatatttaggatagttagctcttcttgttgaattgatccctttaccattatgtaacggccttctttgtctctttgatctttgttggtttaaagtctgttttatcagagactaggattgcaagccctgccttttttgtttgtttgttttccttttgcttggtagatcttcctccatccctttattttgagcctgtgtgtgtctctgcatgttagatgggtctcctgaatagagcacactgatgagtcttgactctttacccaatttgccagtctgtgtcttttaattggagcatttagcccatttacatttaaggttaatattgttatgtgtgtatttaatcctgtcattttgatgttagctggttatttggcttcttagttgatgcagtttcttcctagtattgatggtctttatagtgtggcatgtttttgcagtggctggtacyrgttgttcctttccatgtttagtgcttccttcaggagctcttgtmaggcaggcctggtggtggctaaatctctcagtattggcttgtctgtaaaggattttatttctccttcacttgtgaagattagtttggctagttatgaaattctgggttgaaaattcttttctttaagaatgctggatattggcctccactctcttctggcttctagagtttctgctgagagatccgctgttagtctgatgtgcttccctttgtgggtaaccggacctttctctctggctgcccttaatattttttccttcatttcaactttggtgaatctgacaattatgtgtcttggatttgctcttctcgaggagtatctttgtggcgtctctgtatttcctgaatttgaattttggcctgcattgctagattggggaagttctcctggataatatcctgcagagtgttttccaacttggttccattctcctcatcactttcaggtacaccaatcagatgtagatttggtcttttcacatagtcccgtattacttggaggctttgttcatctctttttactcttttttctctaaacttctcttctcacttcatttcattcatttggtcttcaatcagtgataccctttcttccacttgatcgaattggctaccgaaacttgtgcatgtgtcatgtagttcttgtgccatggttttcagctccaccaggtcatttaaggacttctctacactggttattctagttagccattcatgtaatcttttttcraggtttttagcttctttgtgatgggttcgaacatcctcctttagcttggagaagtttgttactaacaatcgtctgaagccttctctcaactcgtcaaattcattctccatccagctttgttcccttgctggcgagcagctgcgttcctttcgaggagaagaggcgctctgatttttagaattttcagcttttctactctggtttctccccatctttgtggttttatgtacctttggtctttgatgatggtgacgtccagatggggttttggtgtggatgtcctttctgtttgttagttttccttccaacagttaggatcctcagctgcaggtcttttggagtttgctggaggtccactccagaccctgtttgcctgggtatcacctgtggaggctgcagaacagcaaatattgcagaatggcaaatgttgctgcctgatccttcctctgaaagctttgtctcagaggggtacttggctgtgtgaggtgtcagtcggcccctactgggaggtatctcccagttaggctacttgggtctcagggacccacttgaagaggcagtctgtccattctcagatgtcaaactccatggtgggagaaccactgctctcttcaaagctgtcagacagggacgtttaagtctgcagaagtttctgctgccttttgttcagctgtgccctgcccccagaggtggagactacagaggcaggcaggcaggcctccttgagctgcggtgggctccacccagtttgagtttctgggcctctttgttttcctactcaagcctcagcaatgatggatgcccctcccccagcctcactgctgctttgcagttcgatctcagactgctgtgctaacagasagcaaggctccgtgggcgtgggaccctccgagctaggcgtgggaccctccgagctaggcgcgggatataatctcctggtgtgccatttgctaagacagttggaaaagtgctgtattagggtggggttgttatgattttccaggtaccatttgtcacagcttcccttggctaggaaacggaattccctgaccccttgcactgcctgggtgaggcaatgcctgccctgctttggctcacactccatggggtgcacccactgtccaacaagccccagtgagatgaacccggtacctcagttggaaatgcagaaatcacctgtcttctgcgtcactcaagctgggagctgtagacaggagttgttcctattcggccatcttggaacctctccctgttgttctaaaaaaaattttgyatgttttaatttgtttctgttcttaacctttttgatgctcagatattcccttcctaggccagtgggaactccaggtatccttactttttaaaaaaaagtgtttaattttttttttttttgagtcagatgctcactttgtcacccaggctggagtgcagtggcaccatcttggctcactgcaacctctgcctcctgagttcaagcaattctcctgcctcagcctcccaagtagctggcattacaggtacccacgaccacacctagctaattttttgtatttttagtagagacagggtttcaccatgttggccaggctggtctcgaactgctgacctcgagtgatccgcccacctcagcttcccaaaatgctgggatcacaggtgtgagccactgcaccctgcctgtttaaatttttattgtgtaaaatgtcaaatatatacagaactagagagaatatgtgatcaattctcatatacccatattctgttttaaaaataatcagctcatggccagttttgtttcttttataccccaacttacctccgaggttccatactgcttatgatttcatctttgaacactttaagtttcaatcctgttgtcctttaacttccatcttactgccctacaagatgtcccaggtaggttatatgcttttaaccatttaatttacttcattaattaaccagggtgatactagctgctttagcattatagactccaaaatgtaataatggcttaaactaaatggaagttttttttcatttacgtaasagtctggtatcagtgcttctgcaaaagagttttcttcctgggatatttcatatgtctcccatcttgtgtttctgcctttccctaggtccgtagtgctatctacatccagacggtggaagggagagaaagagaaagaaggtaaaaccatttcttaaaatacttaacagaattggcacatatgccactggctaaagtcacctggccacacaagcgggtctgttcaaaaataataaatatttagaaggagagatatatgaatttttggtaaacagccttcagttctcacattatactgcactatactttcaagaactacacaaagattttgaaattctcacttttttcattattatcataattacttttgttatatctttaaggtattgttctggttcataacatgcattttattagctcaaaagaattactgctttccaagtaagggcattgagggaatcagtgatgtataagccttgagttgagcggattttttttttttttgctttattttttaaattgtggaatcatacctgtctataaattatagatgggcatttctatcttcgtaaggaggaaagggtagatatcagcaattgtgagtttgtcagatttctgaaaaagtaggaattatatcagtaaaaagaagggctgattaatatccatgatcacacataggtagaaggtcaaatagtgttgctaattgatagataaatcaagagacccaagaggaatgatgactcgcacagacttgatctccatttcttaggaggtgcggattctcggtagtcttgtaaatttttttttttttttagatggagccaggctctgtcaccaggctgcagtgcagtggcgtgatctcagctcaccgcaacttctgcctcccaggttcaagtgattgtcctgcctcagcctcctgagtagctgggactagaggcgtgccaccacacctagctaatttttgtatttttagtagaggcagggtttccgcatgttggccaggatggggtcgatctcttgacctcgtgatctgcctgcctcagcctcctaaagtgctgggattacaggtgtgagccaccgtgcccagccagtcttgaaaattttaatatgaggttattaaaccttgttttagtaagttctaaactgagttgagacatccagtgtccaagatgcataccagggcagagaggggatgtcctaggggaggaaggggaggcagggaaaatggctgccaaggataagaagccccatctctgctatattgctgatttatggacatgctccctccctgaggggttaccagtcaggcctgggccctcagctggttatgggctctctgaagaggcaaagagtttccatcgggggaataaggtataagtggctcttattgtgttgttgccatatgatttgaaggataactgaatagggatgggatgtctgaaagtgttcttctgctagcatatacccatgcttcatgtgcaaatgtttaatagaagcaacagataccacacacatctccactacccttgggccgtgtgtagtctgcttcattctgtgtagatcccttcatcaagttaaagattaacgattagaaaactctgtgttgcctcaattcaaacatgccaaaatattaacattagagtattttaaaaaacagtgacaatattcagattgatgtgctatttaacaaattagatagtctagcttataaaaattcatctttctttaagggatttaataaaaccattatcattctggatagacaaataaattggtggcctatcaccttatccatttttcctaaattgctctttgtgcaaaataaggtttgcactgatcatgctgatcctcaatagtactttcaatccaatgtttaaaaaacaaaataaggcggaggaattctctgggtctgtgaaacttgatttaggtaacaggctatagtagatgctggtatgtgtttattgtgattcagcaaatgttttaggtcatatacaataatctaacttttacatttgctttcttttgagaaggttttattccaaagaagcttaatttggacatttaaaggggagagtaaggtttcgttaaacccctttgaggtttgcaaatgccctttctcattcaagaaaaaccacagtattattcaccatgattgagacccacaaggacttatttcattctgatgctctttctttgctactgtaagtgatgtcacttgaattacaaagaggagtctggctttcagaagaatcttcaagttagtaataatattctgttctaagtgctgttgtggcccacagttgatatcccttacaagtttttttgtttgtttgtttttttatactttaagttccaggatatgtgtgcagaatgtgcaggtttgttacataggtatacatgtgccatggtgggtgctacacccatcaacccgtcatctgcattaggtatttctcctaatgctaacccccgcagactcctacccctcaaataggccccggtatgtgatgttcccctccctgtgtccatgtgttctcattgttcaactcccacttatgagagagaacatgtggtgtttggttttctgttcttgtgttagtttgctgagaatgatggtttccagcttcatccatgtccctgcaaaggacatgaagtcatccttttttatggctgtgtagtattctatggtgtatatgtgccacattttctttatccagtctgtcattgatggaaatccctcgcaagttttaaagaatatagggcacaagggagcaaaatacaatcagaaatattggtaagaattgtaagactttctgtatataagtagatctcccagtaaggatttcacgatgtctaaagtaacctttctgtaaaatgttgttgtagtaatctctataaaacgttcatgtttcttactagatacaagggtagtctttgtcaaaatggtagtgctggtggtagcaacagtagtaggagctaacctgagcatttgctgtgtgtcaggcaccacattgagtgtctttcatgattacatcagtatcttggaaattgcggccaattgtagccttcctgatttttgctatttcctcatataatctttactttatatatatatatttttaagtgatcccctttaaattattatggaagttttccaaatatgcaccaagtagagtgaatagtgcaattaatttccatattatctaacacatagagcaggcttcatgtgcatgcagcctgagagttgttcagagcccatggcttatgaaggcccacatttggtttaatgtggttatttggttcttctgtcactgttttgaaattcttaagcagttataagagaccctgcatttttattttgctctgggtcctgcaaattatcaagcaggttgtatacctagattcaataatcatcaagatttttactacattttcttcatattgtctttttccctcccctcctttctttttctcttctgaagtattttaaagcaaattgcagacatcacttcactttactctgatgtatttcagaatgcagctgtaacaaatatgggcatttttgtacttaagcacaatgccattattatatcaagcaatataaacagtaattatttggtattgtctaatccagctccacattgaaacttccccaactgacttgaaaatgtcatttactgtttttccttattttcatattcaaacaaattcaaacattatattacatatgttccttaagtctcttaacctagagaaatcctgcctccattcccactgtagacttgttatagaagcaggatcttttgttctgtaggaagtcacacattctggtttcatatgctcttctttaatgtgttccttcaccactcttattttttcttaagggatgctgtctctaaatttgatttaacgtaaatgtttttggcaagaatgctttgcagagggtgtctttactacgtttattaggaagcatccactattcagaacctgttttattgaagctgagattcatcattggttttggcaggtaacagactgactattccattttaaagttccatattaatttttcatgtgattgtttcttcaattgatgattgttacttaaatcaattatgtcattaagtaattgcaaaaatcatgatttctaattctgttaattattttccatttgtcaactagactttttctgtaaagaactttccctgactgactaggactgtttggagcgcacttcttttccttgacttagatttgtcctacgcaataattttagtgtggtgttttagtcccttttgtgctgctataatagaatatgtgagactgggtaacttataatgaatagaaatgtatttgtctcatggtcctagaggctgggacatctaagatcaagggtctgcatttggcaaaggcctacttgatgagtcatccaatggcagaaggataaaagacatgcacacatgagtgagggaaaaaggcctaactcattcgttttatcaggaatccaytctggtgataactaacccacttctctgataacataattaattcattcatgaggccagagccctcgtgacctaattgccccttgaaggacccacctctgttgcactgggaattaagtttccaacacatggactttgggtgacacattcaaaccatagcatttgatgtgctaattatatatattttaatatgctgggaattaaacacataattgttaacagaagaagaaaaccactcatgtaccatctaatatcatctggtatactcccagtggtatatgtgccaggctttgggaaacactattatttttcttgctttacagttgaggaaacggagagaaaataaggttaagcgacactccctgggtggattttagctagaatccaagcactctgacaccagagccaagcataaccactccagtcttgtagcgcttttctaagcggtcaaagtttgcataaaaaaagcagactgggccgggcacggtggctcacgcctgtaatccgagcactttgggagaccgagacggatggatcacgaggtcaggagatcgagaccatcctggctaacacggtgaaaccctgtctctactaaaaatacaaaaaattagccgggtgcagtggcgggtgcctgtagtcccaagtactcgagaggctgaggcagtagagtggcgtgaactcgggaggcggagcttgcagtgagcggagatagtgccactgcactccggcctaggcgaaagagcgagactccatctcaaaaaaacaaacaaacaaaaaaaaaaaacaaagcagactgatctttgaggtgaaaccacgaaggtaattttttaatggcaagtcagtgagaaagcccagaactctcgggtaattgatctgtgttctcactttcagctggtgccacctccatgaccagtgtgatttattgtgctcaccggtttaaatcaataatctgagtatattagagcctagattgacctaataaactcctcaaacttccccaacataatgctttgtagcttctggatgaaatgcttaaaacattttttaatcttttattattcttaataatataaaactcatctttacaagacaacagatagaaaccactattgtttttcaaaaggaaaggtcattataataccagcctagtctagtaaaagcagaatgccaagcttttgggtcaaattattgttcagccccttcaatgataagaggaacatttgaagtgcccttggatagtttctatactacaatctgaacactcggttagtgatatagtttggatgttttgtctcctcaaatctcatgttgaatggtaatccccagtgttggaggtggggcctggtagggggtgattagatcagggggggctgatccctcatgaatagcttagcatcagtcccttggtgctatccccacaatagtgagtgagttttggagatctggctgttcaaaggtgtgtggaacctaccacactctgttctgcccctgctttccccatgtgaagtgcctgctactatttcgccttctgccatgagtcaaagctccctgaggcctccccagaagccgagcagatgccagtgccatgctcgtacagcctccagaactgtgagccaattaaacctctttataaattacccagtctcaggtagttcttcatagcaatgtaagaatggcctaatcgagttgggaaacttagatacagctttaaattttgagcattgtctctaaccatttcatttgatttgccctttcacatcagagaaatgaaactgaacacctttgagggattttatctattggaatatgcatgctaaacattactgaggagmcagaagagtgaggtggagggactaactagagtaaaagcagggcctaccttccaaatttactttttactggaaaaaatgtcacatcatcactatctgacaattacttcttcttggataatattttaaaaggagatgttatgtcatttatggaattttaaaccctcaggaataatttagtctaatcctttsagtttacatatgagaaagctaaagccaagctaatttaaataatttctcccgagattaccagctaattagatgcagacctagaattagacctcaggctycctgactgacatactaaggtaccatatcaattaaagttatgtgattgcaaacaacagaaactaattctgactaacttgtgcacaagagggatatatgcaaagtaaattttgggtagtttaacaaaatctagtgtcaactgtaatgtaatttttttggaggagaagtgaggactagaaatagttaagtaatgtaaaatgtattttacatttaaaagatcagaattgtgacatgtgaaatgcaaaaaatatatgatttaaaaatttattaagataagagtcatataacaaaaaatccattttaaagtgagcaatccagtggcgtttaactcactgacagtgccgtgcaatcatcatctctatccagttccaaaacatttccatccttctaaaataaaactcctcatttcaatgcagcttctcctcatttccccaaacccttgtcagccaccaatctgtattctatctatgtggatttacctattctggatattttatgtaaatggaatgatacaatatatgatcttttgtgtcttgtttctttcacttggcatgttttcaaggttcacccaggttataagatgtatcagaaktttattcctttcttagggctgaataatattgcattgtatggatatattacaatttgcttatcctttgattcattgatgggtgttgatggacaagtgggctgtttccaccttttggctattgtgtatagtgctgctatgaacatgtatgcacaggtacctgttttagaacctgttttcaatccttttggatatatacctaccagtgagatttctggggtacatggtaattccatatctaaatttttgagaaactacaaaactattttccacagtggctaagtcactgtatattcccaccagcattgttggagagttccagtttctctatatctttaccaacatttgttattttccattaaagaaaataatagccatcctattaggtgtgaagtagcatgtcattgtggttttcatttgcatttccctaatgactaatgatgagcatcttttcaggtgcttgttggctatttgcatgttttttctggagaaatgtctgttaaagtcctctacccattacctggtttttttgttgtttttgtttgtttgtttttattgttgttgagttgtaagaatttcttatactgtatattctggatactagacccttgtcaaatatatgatttacaaatatgttctctcactctgtagattgtcttttcatttttttgataatgtctttgatgtaccaaggtttctaattttgaggaggtaccacttatctattttttcttttgttgcttgtgcttttggtgtcatatataagaattcattgccaaatgtgagggtaatgattttacccctatgctttcttcaaagagttttacagtttagcacttatatttagatcattgctccattttgggttaatttttatatatggtgtgaggaaggggtccagctttattcttggcatgtgtggttattcagttgttccagcacaatttgctgaagagattattatttcttcattaaatgacttggtaccttagttgagcatctatgtagatcatgaaacttcagagtgtctcccttgtggagtttgcttagagtcttgctatagtagaaagaatgttggtaggcagcaaatatccactatgcagcccagccactgacccatctttgtgtgaaattctgatatacacagattttcttctgttgaattttcagcaatagtgacctgcaagaatttcagatttgtgtgtttgttaatttaggataattattaaaagaaagacctggggttggagtattaaaaacagacataaagtggaaggtagagtaagaacagagtttttctattcaacttgtctccagggtctgtatacatactggagtctttccttctgtgccaggctgtccaatagaaatatactgtgaaccacagatgtaagccccatatgtaattttacattttgtagtagccacattacaaggagtaaaaagaaacagatgagattaattctaataatatatttcacttagccaaaaatattaaaaatattagttttttccctgtaatcaatataaaaaattattgatgaggtattttacagtttttttcctactcagtctttgaggtctggtgtgtattttacccttacaccatgtctgaatttggataaggcacattttatgtggccagtggctactatattggacagtagaatttatatcaaaagcagccatagacaatatgtaaacaaataactggctgtgttccagtaaagctttgttaacaaaaatacgtggcaggacacaagtgatggttaattttgtgtcaacttgactgggctaagagatatgctcattattcctgggtgtgtctgcgagggtgtttctggaagagattagcatgtgaatcagcagactaagtaaaagtcaccctcatcaaggcgactgagcatcacccaatctcttgaggacgtgaatagaacaaaacgtgcagaaatggcaaattcactgtctctgtttgagcaggtatatccatcttcttctgtcctcagatatcagagctcctgtatcttgggcctttgatccaaagggacttacactattgactctcctggttcacaggcccctgggcttgggctggaactatacctcctgctttcctgggcctccagcttgcagatggcagatagtgggtcttctcagcctccataatggcatgggccaatccctcacaataaatctctttctgtatatctacatttatcccattggttctgcttctctggagaagcctggctaatatactgtctttggcttgtaggctctgttctaggctgttccttttagctctgtttgcaacagagaggatcttcttttccccaaagctgattgtttaggtctattagcccctttgcttacttccagtatcttaatatgtctggcctctgggaatgtgttttccctgctccttctggttttgctgtgccagaaatgaggtgggatgaagaatgcttcagttcttaggggtgacttctgtgggtggatgagggaaatgaaagaagctcttaggtgctctggcttcaggatagagaatataaaacttactgcttacatacacctcttaccctgtgaagattcaccttctggtagtacaccttatgttccttatcactctaaaacagtctctgaatccttcccatccatgaaagacctcttgaggtctcctagctctggaaggttcctggctccaagagggagccatgaggaggttaaaactgaaactttaagtttcatgtggacaagtttactgtatgtaaagttctgtatttttagcagacagaatattatttacctgtaggagttcctcaacacatatttgttgaatgaatgaaggaatacacgaatgaactatcaaagcagctccagttctggactccaatcactgacgttggtaataatttggttgctaaaatctcctcttatgttctatagctcaaaaatgctatgcccagatgctttaaaatgatgccagttgattcactcaccggccatgagcatctgagcagttagttcccaatgacccaacatgccttgatttattgttcatttgatttaacttacagaaggtgaacttactttattttcctgccagaattctggctggatcacagttggtggtggtcctcagggaataaatctcaggcgatggcgctcagtcattttagggttgcctgttcagtataacttccatgtggctgtcttagtgaacacaggccttgaagctgatgatggcattttgtagacaggctacagtgacctacagttcatagaacagtagctggattayctacaagataacaacattctcacttgtgggtaaaatgtgtcattgtttctgggaactgaactttgaaaaataaataaaaatccctaccttgattcccaaagctttgacatttaactgggatgttagagtagatgaattcaatttacatgagttggggtaaaaaagaaaaaattgaaactatttaacagattttcatctctttctctctataaagtaatcaacaaattttcaggttgagacactcaagcagagttccaccttttgggcaattgggcaactctgattttgcattcctcaggatttgctgaaaagttttatagcaaagatggctactggttctgggtggtaacctgtaagaccttgtgactctgcatattcatagaggattttgaaaaagtatctgaattttacagtgataaattttaataacttgtttgtgtatcattaacaagcttctcatggttaccaaaacttgtaaacaaagtcattttgccactgcagatagtatctttctacatctgaacatgaccttgaattaaaaaataataataacttttacttatagtcattttttgctgaacgagaataacttttgagatcgggttgaagcatgttacctgtctgctcaaaacactgcaaggaccccttatttcgtttcatgtaagtgctcaaatctttgacaatggataaggaagccctttccatacccaggatccatactcctctgttctcctaccattttacttgccttctccccttactctcctgcagccacatgggacccttgctgttatggaaacagacctgccctagggcttttgcacaggctttaccctttgaaactacccccctgcccccatcccgggcagctcacggcctgcctctcctttaatgtaactttttcattgaaactaccagacctgccatatttaaaattcctgtctttccatcctcctgatccctctaaggctgctttgttttttaatttttgtccttagccttgaactgtccgtccaacataccatttaactgagtcacttatgtttattgtatctgctttcccaccactagaatctaaactttgtgagtacaaagatctttgtcttctttgttcagtgatgtgtccaatagaagtttctgtgatgattaaaatgtatatggcagacattagccacatgtgctaattgagaacttaaatgtggttagtgcaaataaatccttgaattttaatttyatttaattttaactaactgaaatgttaatagtcacatttggctagtggctacataccataaatgacactgcagatctcgcaaacgtattgaatgaacgaatgaatgtctctttagagcattgcttctaatactttaaaggaattacctggggttcttgttaaaaatgcagattctggccaggcatggtggctcacgcctgtaatcccagcaatttgggaggctgaggtgggtggatggcttgaggccaggagttcaagaccagcctaggcaacatgaagaaaccctgtctctactaaaaatagaaaaattagccaggcgtggtggtacatgcctgtagtcccagctaatcgggaggctgaggtaggaggatcacctgagtctgggacgcaaaggttgcagttagctgagatagtaccactgcaccccagcctgggccacagagtgagtccctgtctcaaacaaacaaacaaacaaacaaaaatgtagattttgattcaggtctagggtggagcccaagagcctgaggttctaacaagctcctaggtgatagctctttacacttttcatagcaaggctctggaagactaatattgccttgcttttagtttgtgtgtttattaaaatagaccaagcagttcctcttttcctggacaagagggattactaagaataacctgttagactcaaataacagttggtaggcccaaaagaccaccaaaagaaaaaaaaattcctttgcttctgataagaatgtaattctcttcctaccttttctctctaatttggttgaactcagttgtggtgcatttagaaactttttggtaaatgctgtttttttgtatgacagtttgtagctgcctaatatgcctgcctgacttgcagtccatttttttcaggtcactgaagatgtgtccctcacaaagaatttttaagtggtactggatggcttagttttgcatcctcctattatctgagctagccggctaaatcagattcccacagtaaaaaaatctcatcaatcttccattgttataatcacattgttcatctacagaataaacatcacctagttattccctcggggaggagtttaaatcttgttcatacgcgttagattgcttcaaacccttggtcgttcttaattatcatgtgctcttttccaggtggttttttgtcagagcagtaaatcttggtacagatcaattttaggtgttgttagtatttaacaacaattaaggtactgatgaatatatgtaatattgcctgatttatcattcccttataggctcttcaaaatatatcagagacacaatttacagtacctgtcagaagaaaaagggtatcatcttaaaagcctgattttgtttcgtttttctcagaagagcatgaggaatgagtgtatatttgaaccattctggaagagccttggtctagcctcagtctttatttgctgtagctgtgcctgacctagacctccaggaatattctactacctcaggactactaagtgggcccctgtatgtaatctctgtttttttttttctttttttttttgttggtggggggtgcttattttcttccttctgcctggaatccctctgtctagttcctgcaccctcctagtccccaaagtcagccatttcaactctcaaggctatcaacaaccatcacagtagtaggtaatgttcattgagtgagcacttttgaattatggggcactggggtaagtgtttcacagatgttgtcttatttgatcctcactacagtgctctgggtcaggagttactattctccttttttagattaagaagcagaggcttagagaggccaagtaacttggacgtgttcacacagttagtgaaagagtctgggtttgagcacaggctgcctgattctagaatccttcttcctattatgccatactttataggtttctccttctccctggaacctgcctccttgcccttgcttcttttgaggcaggtgagactggtgccattaaccaggacctgaagtgtaaactcatgggatctctyccttgtcatcccatagcacgttgtatctatcagtgctgtgccttttatattataggtttatgtgtttgtcctccctgctcaactgtcttggaggcaggaaggagccatatcttacttctttgtatgtctccatagtttttgtgaattgtagaaagctatcttgactttccctaagttgcgtttccatagaataaatttttctgtaataatggtggaacttgaagctatgagcctacttcatcattgtgcaggataggaattgccaacatagtatatttaaatacaatgatctaatttggtagccttacctgaagctaaaaccatttataacccaaccttagtgatttgaagatgagcctagggctctgcttaagagcttctaggttcctcttagtttaaaataatggtcaatttagtggtatgctggtaaatgtttaacagctggctctcaaggaaaaatatgtgtatgtgtgtgcatgcatgccctaatgtgcatgcttgcatgtgtgtttattattaattttactgatataaaggacatgtaacatgtaatttataaatatgaataaaataatcactactcttgattgtaaatcctggatagccagtagattctcacacactgctttggttgatttttgccaaaytcttatatccatagccagtctatgtttgcaactgatgaataatcatctttctgtcatacatattgtatgatagtttataatactggaagaatgggttctccatttgtgtgtgtgtgttattcagaatataacagccacagatatggcacactttaagttaatctgcatattctccatcactctcaagtcaacgaaatgatattgagtcttgatttgtggcatttgccagtttggctgatttcaagctaccaatgtgaatttactgcaagtgaattaggaagagatacatgtagcactctattatgtagtgtttccactctacaaatacaataggtgcaaataagcttaaagagtatagataataaaagtataagggccgggtgcgctggcacaagcctgtaatcccagcactttgggaggctgaggtgggtggatcacctgaggtcaggagttcgagaccagcctggccaacatggcaaaaccctgtctctactaaaactacaaaaatttgccaggtatggtggcaggcgcctgtaatcccagctacttggaaggctgaggtaggrgaatcacttgaacacaggaggcagaggttgccgtgagccaagattgcgccactgcactgtagcctgggcaacagagccagactccatctcaaaaaaaagaaaaaagtataaggacatgaygagcttcatatatttatttatttaaaatatttttatttaattgtaacttttatattttaatttgtwtaattctataataatttaaaataatgtctgtgtttaacagctggtatgcaaagttactgaaatttaccaattgcaggtaagcctcagggaggcagctccagtaggcaactgtttcaatccaactcaaaagtggtgtttggttatcagagctaggatgtgggaaggtgaggtttgaattctagctctgctttttactatcagtttaaaaattaaattactgtttgttaaagctcattgtaagctttagcagcggcgtccaatcttttggcttccctgggccacattggaagaattgtcttgggccacacataaaatacactaacggcaactgatgagcttaaaaaaaaattgcaaaaaaaaggtctcataatgttttaagagagtttaggattttgtgttgggctgcattctaagctgtcctgagctgtgtgcagcctgtgggctgcaggttggacaagtttgctttaaagtattttataaatcttaagatttctatgatcaggtaaggctggcgaaaaaaagtgcagcaatgttggtgggtattctctttgagccaggcgccatggtaacagctttacatgcattatcctgtttcttcttgacttcttgtgagtaccattattattgtcgttctatagaagaggaaaccaaggctcggagagaattggaggtacactggtcagaggtggagctggcctcagacctaggccccccaaacactcttggcttctgctaaggaaagcagaaatgagaggaagcaaaaaacagcagacagagagtacaaagctgactcctttaccatatttctcctcttttactcttcattcttcttcttgaagtgggcgtagtggtgggagatggcttttttcttctccctgagcataaaatcatttcatgcttgttgcagaacagcagaaaatgcacaaaagtatagatgtaaagataaaaatgatgtatgatcctatcacccagagaaccaagattttaacatttagaaatatgtaccaataaatttttgtgcatataacatataaaatgaaaataatatataatagggtaaacatcaacatatacttttatttaacaattatttctttccattgttatttcctgaatttagaaagggtagctcttttgagaacagcagcccttagctatttggaaagtaaaacttaggagctagaactacagtcacaaaagctacgtagaatcaccaaaccttttcctattattccagtttttccctcacataagatagtcaccagatatattaacaaacagtacctgagtaatttgagcttaacttccatttcttacttttctcccttccttggtagatgggaagtaggagagtcaaagtttagatggtttgtaaactcaatatttatttattggataattccgtatttgatctaacattaagaatattttccatatttctgtgtctgatctgtaaatctgaattctgttagtgccttgttgataaggaagagagaagattttcatgttcaatgtgcttatccattcaaagggtaagagcaaactaaaattcattccttggttcaagctggagtttcacacatttagcactttggagacattgcccgtgaagaacaaaatcatatagagtgacatttggtcactgacctaactaagggtacttttggggcctttactctactgcagcaacaatcatatttgaccacaatcagtgaaacgtttagccttttacattcagttgtgtgatcagggaaataatttaatacgctctgtcctacagcccataacatataagtcctgtgtggtttggcctaataaatctttatccctgtcttgatcttcggatgtctaacaggtcatattattctgaaagaaatgttttcagattttgcacataagaatatgttggtcatttttctgtttaaggtaggcaagctatatagggatgaaaacacaatgtctaactggaaatggagagtggagagaaggtgaaaaagggatattttttgctgacagttcatagatatagacaaggtaatgtctaaaacgtatctttacagcttttataaacactgtcttgaaaacaatggtatactgtaaggttagtgctcagaaaaaaaaaagctgtcacttgtacattaatcagagttgctctataaagaatgtttcctgagaaactagtggttactaacagaagcaatgtttagcatattttattttacagcatattgttaatagctatgatcatatttcattttgaagataaactttaaaatcataaaatgcgttgtcttttgaaatattttggtagcttcatttaaattacagttttgttacagtatttattcaactggcattgttagactattccatctttatatatttagtcataaccagcttcttgacaatgtttttctttctttgcctgtactttgctcatacatacaaatgtaacaataaacctataattatatagaatttttttcttaaaaagaaaaagaaaagccaaacagaagctcttcccttaagaaataaaactcagcctttgcaggaaatttaaagcttaggagaattcttagctcagcctctttgaagacctaatcttaccagttttctagtgttgagtggaagaaagtttgtatttaaacgttgcctctctattgtttggctaggttattttgttgggggagaaggggggaaaacagggttgaatgtcatataaaagtcttagtattataatttctttagaaagtcctttgaagctttgctttctccctccttttccccctcactagcagatttttaagagttactctgtgtaggttgttttgaaaagatgcgaagttatattcttgggtaacaagaatataactctcatgagtagcagaagctcttctgcttgcatcacaaatttacattttgtaaaatatactatgttatttctccaatttgattggcttttataatactgtccaacatgaaaatagtatgaataatttaattagatcccatttgtcaattttggcttttgttgccattgcttttggtgttttagtcatgaagtctttgcccatgcctatgtcctgaatggtattgcctaggttttcttctagggtttttatggttttaggtcttatgtttaagtctttaatctatcttgagttaatttttgtataaggagtaaggaagggatccagtttcagttttctgcatttggctagccagttttcccaacaccatttattaaatagggactcctttccccattgcttgcttttgtcaggtttgtcaaagatcagatggttgtagatgtctggtgttatttctcaggcctctgttctgtttcattggtctatatatctgttttggtaccagtatcatgctgttttggttactgtaatcttgtagtatcgtttgagatcaggtagcgggatgcctcaggtagtgtgatgccttctttttgcttaggattatcttgactatatgagctcttttttggtttcatttgaagtttgaagtagttttttctaattctgaataaagtcaatggtagcttgatggggatggcattgaatctataaattactttgggcagtatggccattttcacaatattgatttttcctatccatgagcatggaatgcttttccatttttttgtgtcctctcttatttccttgagcagtggtttgtagttctccttgaagaggtccttcacatcccttgtaagttgtattcctgggtattttattctgtttgtagcaattgtgaatgggagttcactcataatttggctctctgtttgtctattattggtgtgtaggaatgcttgtgatttttgcacattgattttgtatcctgagactttgctgaagttgcttatcagcttaaggagattttgggctgagacgatggggttttctagatatgcactcatttcatctgcaaacagagacaatttgacttcctctcttcctatttgaatatgctttatttctttctcttgcctgatcgccctggccagaacttccaacactatgttgaatagcagtggtgagagggcatccttgtcttgtgctggttttcaaagggaatgcttccagcttttgctcatttggtgggatattggctgtaggtttgtcataaatagctcttattattttgagatctgttccatcaatacctagtttattgagcgtttttagcatgaaggagtgttgaattttattgaaggccttttctgcatctattgagttaatcatgtggtttttgtcattggttctgtttatgtgagggattatgtttattgatttgtgtatattgaaccatccttgcatcccagggattaagccaacttgatcgtggtggataagctttttgatgtgctgctgtattcagtttgccagtattttattgaagattttctcattgatgttcatcagggatattggcctgaaattttctttttttgtttctctgtcaggttttggtatcaggatgatgctggcctcataaaatgagtcagggaggagtccctctttttctatttattgtttggaatagtttcagaaggaatggtaccagctcctcttttacctctggtagaattcagctgtggatccatctggtcctgggctttgtttggttggtaggctattaattactgcctcaattacagaacttgttattggtctcttcagggattcgacttcttcctggtttagtcttgggagggtgtatgtgtccaggaatttatccatttcttctatattttctagtttatttgtgtagaggtgtttatgtattctctgatggtgcttttatttctgtgggatcagttgtgatatcccctttatcattttttgttgtgtctatttgattcttctctcttttcttctttattagtctggctagcagtctatctattttgttaatcttttcaaaaacccagctactggattcgttgatttttttaagggtttttcgtgtctctatctccttcaaatttgccctgatcttagttatttcttgtcttctgctagcttttgaatttgtttgctcttgcttttctagttctcttaattgtgakgttagggtgtcgattttagatctttcctgctttctcttgtgagcatttagtgctatacatttccctctaaatactgctttagctgtgtcccagagattctggtacattgtgtctttgttcttattggtttcaaaaaacttacttatttctgccttaatttcattatttaaccagcagtcattcaggagcccattgttcagtttccatgtagttgtgcggtttttagggagtttcttaatcctgagttctaatttgattgcactttggtctgagagacagtttgttatgatttctgttctttttttttttttttttttttttgagacggagtctcgctctgtcgcccaggctggagtgcagtggcgggatctcggctcactgcaagctccgcctcccgggttcacgccattctcctgcctcagcctcccaagtagctgggactacaggcgcccgccgctacgcccggctaattttttgtatttttagtagagacggggtttcaccgttttagccgggatggtctcgatctcctgacctcgtgatctgcccgcctcggcctcccaaagtgctgggattacaggcgtgagccaccgcgcccggcctgatttctgttctttttcatttgctgaggagtgttttacttccacttatgtggtcaattttagaataagtgcgatgtggtgctgagaagaatgtatattctgttgatttggggtggagagttctgtagatgtctgttaggtctgcttggtccagagctgagttcaagtcctgaatattcttgttagttttctctctcgttgatctaatattgacagtggggtgttaaagtctcccagtattattctgtgggagtctaagtctctttgtaggtctctaagaacttgctatatgaatctggattctcctgtattgggtgcatatatatttaggatagttagctcttcttgttgcattgatccctttaccattatgtaatgccctactttgtcttttttgatctttgttggttaaaagtctgttttatcagagactagtattgcaactcctgctttttttgctttacatttacttggtaaatattctaccatccctttattttgagcctttgtgtgtctttgcacataagatgggtctcctgaatatagcgcaccgatacagcacacccacgggtcatgactgtttatccaatttgccagtctgcatctttcaattggggcatttagcctgtttacatttaaggttaatattgttatgtgtgaatttgatcctgtcattatgatgctagctacttatttttcccattaggtgatgcagttttttcatagtgttgatggtctttataatttgttatgtttttgcagtggatggtataccagtttttccttttcatatttagtgcttccttgaaaagaaatcaaagtgaacaggcaacctacagaatgggagaaaatctttgcaatctatccatcagacaaagtgctaagatccagaatctacaaagaccttaaaaaaatttacaagaaaaaaacaaacaaccccataaaaagtgggtgaaggatatgaacaaacacttctcaaaagaagacatttatgtggccaacaaaaatatgaagaaaaactcatcatcactggtcattagagaaatgcaaatcagaactacaatgagataccatctcacaccagttagaatggcgatcattaaaaagtcatgaaacaacaggtgctggagaggatgtggagaagtaggaaagctcttacactgttggtgggagtgtaaaatagttcaaccattgtggaagactgtgtggcaattcctcaaagatctagaacaagaaataccacttgacccagccgtcccattactaggttatacccaaagggcctgtcagggtttgtggggctaggggagggatagcattaggagaaatacctaatgtagatgacaggttggtgggtgcagcaaaccactatggcatgtgtatacctatgtaacaaacccgcacgttctacacatgtatcccagaacttaaagtataattaaaaaaaaagagaaaatcatatgaataaatgaagatgttaccttgacattccttttaccattgtgcctggagactaggtagtctgacttgaatagaacaagaaatgacagcttttcacagagagctctgagtaggaatgtgaaagaggttcatgggagcttgttcctgtgtaatgtttaaagccatagagaaaagaatctgtgtttgcattaaaatatcaaggtataaagagagctaagtgtgctatatagcgttatattacacagagtatgaatgtgaaagaatctacaagttactgcatttttggaacctcattaggtgccactaaaacagcattttctctgtttctgcatatggcaatctattagacttcctattcacggtaatgaagagactcaacatatacttaatgattgggcttattttcaaaacttattattggcttgctgtttccttccttactcccacctgttgcatgcccctaccagccatagaatagtaccttgcaacattcaagacatcaagaggaaaataacacaactaaactattttatactgggaactttccaaatacgttttaaacccgactaatataattctttataaccaatctcaactctttgaactaatctctaatatatttcataacatattgcttataatagagaagacatacatataaatatgaggtaaatatgggtacattgttgctgatatatcagttgttatgatagatttaaaaataagcacacattccttctaagaaagatttctcctaaggaaggccagacagcctaattttttctactatgtaaaaacaggaaaagcaaagtttaaatcagaaattgtcttttaatgtaattattcatgctttatttattccattactgtcaggatgactgccggtttatctcatttagaatctcagtgctagtctgtccagtttattatctttcaggtttatcagttgtgttttactgaagatagacacattaaagtagaatgaggatctaggggacaatggaaatagtttcaacaggggcttaagtgagaatgtgtatctatcccatgggtgaaagaaatgcaaaactaaaacaagaacaaaaattaaaaaaacagacagtgattaaattagaaatgctgtgatttataatttagtataaattagtcttttctaatttggtttgatagcaaagagaaatatactggaaagattctattccattttatctcagtagccttagaaatctttcctttgaactttccttgctggggtgatatactgtgttgatgttctgcacaggctgttacttgtgggcatctgactgtctaaccatatctgagaactacagagagttttgtttcacagtcaaatcccttttggggtcaaacttaggaaaactagaataactgtttagagaaactaaaagttggacatttacttctttttcaaactaatgtaaatggtaatgtgcatgacacttaaattcccaacagcaagttggtttgctatttgctcagaagtgaaggttctagaattctccttcatcttttctaaattggaaaaagaaacaaaaatcaaaactctttctttttccttgattagtcacatgtatcttagtgttgcattgattaaggagtcagacagacatgttttaaagtactggttccatcacttactaggtgggtgactttgagaaagttacttactttttatcatcgtgtttgactatctgtataataaggatgatagaagtacttacctaaatggattattataaagattaaattagatcatgcatatatagtacctggcacatagtaaatgttcaatgagtaattgccattattttaatttttatcagtttgtcttagacctcaagtcctatttttgaatttcagtagtgctgtcactattgactcctctcgtatcttctttttctctttttggtagggctgcccaactttgaaatttgatttgttaccatcttttccagtattttgtggaaattttttctctttagccacttctgtgtgagacagctgttccatttctgtatcagctgattatttcttgtgattctgagtgatattaaagaataaatcaatgtctttatggaagaagataatgcccctcctcattgccaaattcttcacaatgttatctcagcatatcatttatttgttcatttatatctttcctagagatttttgcagcatattagacacccaagtggcaacattgaatgaattttggtccctgtattcagggagtctaatgtgagcacagatatgtccctaatcaaggctaatgggaatacaaattgtgtgaatgatacatcggattcctagaaatgggaaaaacaaaattgtcctgaaacaaggcctaattttttcaaaacttgtgttaccagccttcatggttcttaaatgtgtcctgaagttctcttaagaatctctgaaactgtttttctatcagcttgttttctaactaaatttgctttcctttgagcactaacattcaaaataatgaaagtgcacacacacagtcattatcttctattttatttctattatttgtttattttgagacgaagttccactcttgtcgcccaggctggagtgcagtggcgcaatctcagcttgctgcacctccacttcttaggttcaagtgattctcctgctttagcttcccaagtagctgggattacaggcacctgccagcataccttgctaattttttgtgtgtttttgttagagacggtgtttcaccattttggccaggctggtcttgaactcctgacctcaggcgatctgctcacctcggcctcccaaagtgctgggattacaggtgtgagccaccaggcccagcctctgtattttatttttagttgctctcattactactcttgcattagggttgtttttgtgatattttgcccttgcaagtatacaggtcatcttttgtggagaaacctggacatatacacccattttgttatttctgtctgtgttcctgttactgtgcagactttcagaacagatagwgtttgtaaattgcctgtatgcttcacatgaatttgcctttagtttgtgcacacacataagtaattcacacataaagttcacatgctctggggagccaaatttatgcttgatggttgctatgaaaatccaggacttgtttcattagtgatggagccatggagctgagggttcttgtgaactcttatgctacaaattacatttcccacagaaagaaatgttgaacaaacacaaaggctggtgttggtgtacccggatagctgcaggctcttatctattaatgaccgttgtcataagtaacttttaggacaccaggcaacataaatttatttttgtttaaacaaatagctgcaaaatggtaagttccaaaatcccctgtgtctttaaaataaggcctatcctaaaaccagcatttctttgtcttgctctgtttctttgttctactctcttattttactgttttgacaacgtggtacttatttttgttgttccctgttttctaccctagggataaactcttcattactttttaaaatctatgttccattaatcacgtgatttccatttcatcactcattactgtccttttcctccacttctcctccctctggttttattctgcccatctgctcattacgtaaaatatggttaatgtgatgagaggccttgcctaggaaatcaggtggcttatgagcttcagataatttcttaaatgtgtttacaacttttatgaaaacacatcctctttgggcctgttaggaagtggcctgtacacatggcacagatgttcacagaggcctaagagagtagcctagtgaaggagaaatctcagagcagttatgttgttgaacactttagcaaatagtcttcaccacttactacactgacaaagttttttaaaaaggaagtaaaagaaaaaaagttcctctgaagatctgtattgttcctctgtgctttgacatgtgccagtccttggactgtcctggctttttttccttgcttttcatcccacttgaccctcaagtaaaaaagtaaatacctgcctaccatcacgatgctaaacccaaactcagaggcctgtaattgctatactaaagtggaatagaaaggaagggaaagagagagagagattgaaccacattccttcatgttcttcaccttatttcttattctaataaccaggagttgcattgtatccagctgaatgcataaaattgctaatctgaaccaagttccagagtgctgatttgctttaaaacaaacaaacagaaagccatagtgacattcctgaaggcatgcctccaagttcttaatgtaattacttcttggttcctgagatgtaattaattagataaaaagagatcaagcgtaatccaaaaggatatagaatattttctaaatgggagtgactgtgggcttcagagccatgaaaacaagtcactagatccagggacacaaacatctccctcagcccctcactgtggtgggaaaacctcttgaaggcaagaaccactgaaagttacatacagagaggctggtcagagggataaaaaaaaatcccccttcgaatctgcagaaggttttcttaattttttttcccgagtagtctttctctacctggggttgtctgccctaactgacatcaaggccattttattgaaaattgttcagattgtcgatgaagcacttagtctgacatactttgtctattgttactgttaaattaagtttcactctgacagctgaccaccaagtcaggccccattttgtctaggagcttctttgattcaggaaaagtaccttatctagtaacctcattgttttgtagctcctttttacgcataccttttaacacacttcaagatgagagaaaagaggatcttttaaaatgtcatatatatggatgtgtgtgtacacatatatatatgtatatggatgtatgtatagatatacacatatatacatgcatatatatacatatatatacatatataaggatgtgtatacatatatatatatatatatwwwwtwtwttttttttttttttttttttgaggcagagtctcgctctgtcacccaggctggagtgcagtggtgcgatcttggctcactgcaagctccgcctcctgggttcacgccattctcatgcctcagcctcccaagtagctgggactacaggtgcccaccaccacgcctggctaatttttttgtatttttagtagagacggggtttctccatgttagccaggatggtctcaatctcctgacctcatgatctgcccgtctcggcctcccaaagtgctgggattgcaggcatgagccactgcgcccagccggatgtacgtatatatatttttaagcttagggagttgtgaagtcatgaaaatacagagctacagattaatatagctcttgagcatcatagctgctgtaaatatgtccctccctccatctctcctttcacaccccaggcatatatacctcatactgttctaggcagcaaggagcaaatagtgatgcttgccagagacaaaggaaaggagagaagaaatacatgagtaacaatatgttttctagtcatagccgaagaatcatggtatctcattgctggaagggatctttaaagttatgcatggtgtttccggccatttgtcctcttccaaggagagaacacaaattcccacagctggagttctcagcatccatagggatagtggtgcagcttgagtaggaatctggaaagtcatgcagagtgtgggtattctgtcgaaaaattcatcccttcctgtgattcttctcatctgccctccttgccccgtctcttgcccctcctcaaataactggtttaaatcaactttcttattttacagataagaaaactgaggtccatggaaaggtcaaaggacttataaagatcattagacactgggaaatatatttttccctttgttttattagggtatttcttgtctcagaaagaaaactgtgaaagaaatcaggctggtattgctgttgaggcagggactatataaagcaataggtatctttgttttcaaatgaaatttaattcatgttctaatcctattgtgaattagtgataaaatttagccatcttctatttgaaagggccttgctgctttaaattatccacctccttctctgatatcatgatggcatttcatcacctcctcttttttctctctcccttcttttctattttccttttttgccttgttggactagataacatatttgtaaagacacttaaaaagggattactctcaaaaatctgctacagaatcaaagcaatgcatttgtattttggacctaaataaaatgaaaagcctgtaaatagaatgcaaggtgaatttttataattatagaaccatatttcaaaagcactggagaagattgttatttgaaagaacgctgtaatgagtcttagggtaaagcaaataattagaatcatatttgtttggaaagtttatcatatccacaattcagtgatctggagaccttagctattcagaaatccaatttctaaggggagagtggatcaaagagcaaatctgaaagtggggccaggaaagcatatcttctaattccagaaataataacaaggcaggagaaacaaagcagaaagctcctttttttcttctttctttttttgctccctgaaccttgaaagacttctggaaaaactataggcttccaatttgttataagtttaaagagttgcaaagaatataatttctggcttattattgacatttaaaaattgttaaatattttttaagtatatccgtttggaatctaaatactataatgagttgagtctcactattgtcaatttaacaatataaaaacaaattctttattcattgaaaattgtgcaccattcctttctctmtaastcatatttcattcatttgtctcacagaattttatcaatgtaatatgcttgaaatattttatgcatcatcatatagtctcagaacattaaatttttwaaaaaaattttgaatttataatcctctacatttcaaaaattacatctggattgagcttttatcactattattagcacaagattgatcaaaacaaaaaatatgtatttcttatattttttatatattaacaattattaaatataaaagttaaaattattgaaacctcacctaataatgagattgtcagggctttttttgattttttaattcattcctatatcaagtcaaatattatttgtttcaaaacaaaacaggatttagcacaatcccaatttttcagttttctagatataagcattgagaaatctttctcacatacataagcagatgagattggaggtatttttatgtcattgaattttttaaaacttcttgccagttttatgccaaaaatcatatagtaatttctcatcaaatttttttttatgattcatcctctgacaactcaattagttctacttcaattttattgagagaaaaactgtcttgaaaaagaatttgttgctcagtcactcaagatattcaatttctctttttcctgggaagtacaccaaaggcttaccaaagcttctcaaatgcccattaattatacctattcctctttctcttagaggtgccatattgaatctgatagactcagaggtgggaaaactgaaatattccaaatttcagtatacctctgcaaatatgatttttaatttttggacaagattctcttgcttagtacattctttgagtagtgtatttcctccaagccttggaactgcagatttaactcattagctttatgaaaaatgtccactttatagtttattttgaaaaacttatttgctgaatcaatcagctaggtcaggcctactttctttcaacttgggttttcacattcaattaaacttccttgtggtccttcccatgcctgtcatttcacttctgagttctcagtctgaaatagattggctgatatggtgaggaggtttgcagtgagtctgctcctgagagaaataagacaccatcgccattgtattttttacagattcccattttgctttgctctcatgggacttttttctcaggagcaatgtattctttgacaattgtttgcagatgaaaaggcgagatctttaaacagaaattgtcatccccatgatacccttactgcagatacattttcagacatatcaattttaggaaaaaagttgaggatcttgaaatgtattcttttaagaatatctgattccatgaactccagttggaagactttatacagttatagactgtataaagcagaagaatgaaggtacgtaacagcctaagttagggccatttagtgtgttgatgattagtgttaatccccttcatatatgttctgaggatttcaataactgatattcatattggtgatctggattcatcaagaatttatgagggctggtttctkcctaaaacagcattttggatcaatttttatgtgagagcaagctaaaaatgaaaggtaaattatttgatactgaaagtggtaaatctttggaatctatgtcttttgcacctacgtttctacaatgaaatttgtaacttgtcataaataggaatctattcaggttcaacattgtggaattccacaaccacagttataaaggatttggaaaattctctaagctacacaagaaaacttttataatctaaaattaagaatgaataagtaagtcagtgcatataatttctctggtttttcagtagcccattacttcaagatttccaccttgtggaaagaaaggaaacattcgaagtttaccttaagtgaagagaaatttctcatgttagagaatgtgaattaaaattattttccaagaatttatcttttacctataattataacaacaatatatcattatgccattactcctacatatactgagagttcaatggaattatttaggttatattttttctgactcttactttctataaaacatggaacagtcaactcttgatattatctacttctccttccacaattctgctacaatgagaaatatttaggtaaaccttagaaccaattaacttattttgtgtgcagtttagctggtgatataagaaatatcagaagggactttaaatacatttcttaaaatattggcagtgtcaatgctgacaggactgaaagaaagcttgtagtctaaggacaaatgtgcaggcatttgcacagtatcttccttggccatcaggtggaacagaatatcaagcctgatccctgttggttgtttagtccagattkaccaagcagcagataaacccagatgctgtgtggctgtgcatgttacttaacctttctaaacattagttttgtcatctgtaaaatgacaatggtaatagtacttattacatgggattgttgagtcacataaatgaatgaatgcatgtaaagcattttgtaagagcttaatattgttagccattatgattatcagtaggtctgcaataataccctaagtggaaaatatggactaatgggctaatattggatcagttgagttaaatgtatttacagtttgatacaartataagatcaccccagatccaataaattcaatcagttgtttaccatttactttttttttttttggtaatcaagtgtaggaatgctttgtcatcaagtatatttatagcatagacatttttggtaataattgaagatatgcgcagagataccatgcttcaggtgatgtgattattcttagaacattgaggcttgttgttatttaccatctctttctagtttcaaggtgccacttaggtagatgaaacttctggctgtatgaaagattgttaatgtaaatcttctgcactagtgactattagggtaggtctaaaatatcaccttgtcatagaattctctccaaaatagaaaagaaaccttcaagctcttttcgttatttcctaaagggtatttgtaaccacagtaactatgaaaggctacccaaatattatatttcccatttttgtcaaagattaggttaccttcatgttgtaatttcattatttatttattagaagttccatcagacaggatatgtatttttcttaataataccaaaaaggaaatgaattaatcgttaatcttggatagatgaaatattttcaaacatgtactccattctcaaatcataataaaaggagtccttggtagtgagattgttaggaagcacttctttgagtaggttgatttgggagcagtggggcaggagtaggcattattattatgtagtatctatataataactctagtatatgaatttgatctgtattataggaatatgattttacagcaaccagttaaaaaacaatttcattgactttcactaaggcatcagtttaataaccatttggccaattggtcaaatttgaagactcctatttcttaagatcaaatttcatatatggtagtggaggaaagcactttaccgtttcagagaagaaaacacaaaaacaggaactaaggacgaattagggaacccaaaagaaagagaaccagaacatatatcacgtggccttctgacgctaagtgaagctcatgcctgcacccctgctgctcttcctgttccttgtcagtgtcagccgttgttttgaaagagacacaatgggacccagtctattgcttcttaagctggggcagagtttatgttttgtctgaatggctgcctccttattcttcagagggcccaataaaatatgttaaatactactggtgagtaaaattgctgagggaagaaacacaattattgggcaatgtttcttgggagtttcaggataataaagcagagtttggaaataagactgtgtgaactatcgagtagctgtatcagtttgtggaattaatttactgaggcggttagctgccagttttccgcacasacacacacacaaaaagcccaaattagttccattattttttaacatgtgctaagtgcccatagcatgttggtgccttcacatgatatcagaatgcactatggagggaactgaacttgttattggatttaattaatctctcaagttaattgccaatgtgggccacatttcttatgtgagtaaaattggagtgtgagaaaagataatgtccctccctcattaagctgtccacgttagatttacagggtgacagtcaggcccactcaggcttagttttgatagctttcattactgacatcacagagtaagtggtgatctgtcctttcattattagactcaacccaataactgttgcacaaacacaaccacctctatcagggaggcttcaaagagctgtttgtagtttaatgcttcgcttgtcatttttttttttcttcctagccccagactccttttgttctcccaatgcagggagaattgtagtgcagagccctgcctgacacctgccaagaagggcagcccttgccaactgcagccttccctggagcaggaatcagttagtgacttctgcaaatgatgtgactttgtagatcttaggaacttcttttcacacaattacataacaggcatgtgattcccctccatccccaacttgtgcttataaaacactrtggacagtaccttttaaaatggctgagatattgattacctgcaaaaactggaaaaccatttgtatgcctgtctgttctgtaatgtttgcttctacagggtctttggttgaattccctagaactggagatgggtgtgcaggtgattagtaagagagggctcttgggagaaaccaggaagggagtgagggaattagtataaggaagtggaagaagctaccaaggttgtggtttcaggtgaaattaacctgatcamatggggagtcttgggagcatgaaacatactacagggtcagttctgccttgagacaggagtgtagacttttgtaccttcccttcccaccattcagtctttagctatggaccctgggtgggggccgaatttagtgatatatctccccagaacctctgggtgttgctctggtcactcaagggcaattctttggagaagatgggcagcaacacctgtagggaggaatgggacaccaaactggtaaaagggatcctacagagatctgagtggaacatcaacagcttctgaagtgtagggaacacattctgtagtcgcatagggcatttgcatgcataagggaacccacgtttccttcaagttacacaattttgtgtcagagtgagaaagcattgtaactattgactcctgattttgtgttgtgactccatctttggtaggagattaagaactggtagacagatgaaaatcatatattatattttttaggtttatggaagatgaagttagtagttctcaaataggtattcacctgagaaaaagaatatgaaacttcttacctccactgaacctaatgaatttattgctcctccatcgatttctagtaaactgttgttaatgcctgtaaaggtaattaaacatggcagatgaaaaaacgattacactctcaggccaaagagggagtaagttatgcagagtgtctgggggctacaaaatacagcctcttgttccatcgaatgacagggtctaactttgtgatgtaaacacattattgcaaatgtcagtgcacagagaattgtttagacagactgcaaagatgattactaaagaagaagcaaagcaataaaatacaaaacaacaacatttcattggcccagttataattccaactttttatctgtttggatgaacaatttcatatagagacttttctatgataagcttttaaaaaataagacagcaagatgaaagaggcaacaattaatattaaaatgttatgcacattaatgtaaatgrtaaaacattttatatctcaaactgcaaagaatatattctgtggttaatttttctttcactatttcccctccttctttccaatcgaaagtatcaacagcttaatattatagatcaaattattaaactttctactatgtaagtttttgaacttagccatgtatatatttgtatctagataatttccgaagaatggagtaaagatgctttattcattctgtatattttatttcaaaaatactttttcagcagtaattcagcaaacttaagggtttgtaaaggtttttctataaagagaaaatgtgttatgtatattttatttaaaagtgtgatgcagttctccaaatgcagttaattgtaaaaaaaaaaaaaaadgttttccaaatcagtgggggacttttttggtgccttcttttgatttttcatacttttttttcagaaaggaaattttatacataaaagttggtaatgtctcattacataaatctcaagtgccaagtgtcatccctaaaatatttctcaccttggattcgtgaaatatttttaatttcatggataattttgctttttagcatttgttatggtcattgatgttgctgtttttatgacagaataatttttaataacgtttttgttcagctgcgttcaaatgataaaaggaagaaatttccttaaaaaatactgcttgaggttaccttctgagtcttcttttggcatcttaatgtcaaatcccatatttgagagcactaatccatattaaaagaaggttcaaaattgaaattataccattaaccttggcctttttcaagtgaaactgttttacaagttctctttgccatcagcatgtttaccaagctctttattttcaaatgtgacttcaggcaattttttttttttaaaaaccttgttttaagcatggtggtaactgctcttcctgctccctacttaccacccaagagctgttttccactgctgccttcccttgcctgctcttccttctttcaccctcagattctaaactgtgtagatgagtggagtgggtgaggacacagctagtaaggagaggggccatttccacttctgggtcctttcctcaaaagaagacttgctgagagcccagccatgttggaactaacctccccgacagtaagtggctatcttgacctagtgttcgctgtgctccaggctgttccaagtgttctaaatgcattcctttcattcttcacatcagctctaggcaccacatatataattattgcgtttcacacacagggaaaccgaaattcatagtggcccagccatgcaccacacagcctgctctgaaaaagcttcttcttggattgagggaccaggattaacaaatatttatcagttccactacttcaactatatactgaaaccttatttaaggaattcttcgtgtctgttgcagaagttctttgctcctaggttaaagtagggtggttcttatcatcactattaccaccatcatttgtcaccgctgccataattatcattgtcaccatcaccatcaccatcaccagtaccatcaccatcaccatcacaatcattatcatcctgctcctcctcatcatcatatatagcagttactgactatctcttctgtggcaagccctaagttagatgcttagcttttagcaagtttttctctaattcccctcaacgtgataaaaataaaattatctaatatggacaggtagcccatctacataaaataatggagaagtcattagcttaggaatttgacagatctgagatcctaattataagcaataattataggcaacatatctgagcttcatttactcacctttcctaagagcttaataattcctatcacattctttctagggagaatgaaataagatgggatatatagcaaatgcttagcactctgctgcaatcatactagccacccaggaaacattggttcttctccctctctgctgtacctctcatgtggggagaaaatggtgggaggcatagataattgctatattgaattgtataatgaaaaatatcccatattatatatttaacaacttacatttctcatttacttactatgtttgaggtatgtttgagtgcataatgtgctttacatcatttaattttcacagcagttctctgcggttggcggctgattgattttcttaataccaggaatcagggatgctatccttttccacctgctgacctgtatgcttcatcagtgggtttttttgccttctggccaatggggggacccaagcaggagactggaaaatggaaggagagtgaggtcaaggtattagttgccttggatcactccctgtggggtccctttgagctggctatgttcctctatcaaagcagatagctcttctcgaggttgacctctccaccagactttctctttccaagttctggtcagtgctccttccccttctccctttatgtcgtgtgatgataacagttccagagtgttgaatgtcccttatggttttcctacatactacccaaagttttataaatagtccctttattaaaccttcctcaaattattctaatttcagtgggccatctgtgtcctgctcaattcctaccaatacagaagaggagaaaccgggcaacttttttgaaactgcatatgtacactgggcaaacactttatttggggtggcttgggtggatactggtagagttgattggggagctaaagacactcaggccatttttgccattaacattagcaggatctatttttatcagtctcaacagatattcagaacttttgtttcaccatggacataatctgtgctcaccttctttcacttgcacaatattcatgtggctccgatactagattttgcactcctttagggtagggattcttctattcatctcggtgccctcaacacaagtacaccactgtgcttagtagacactcagtacagtcattatttaataatctgtctgcccacccccaagcataaggatgatctgaagtaagtacacaagtacactcacagagcatgttttgcttcttgaggttagcttccataaaaaaccaaactgatgtattgctgatgtgttatatctgtaaatattacagaaatggacatgccagatttctcttctttagcatctgctataagagaaaaactaggcagatgcctggaaggcatgggcaattgcaacttttcagtaagatatactgatctggttttaatttgaaataataaagaacattttttcttctctttggacttttttacctattaaaattggttccaaaatgttctcaagtactggatattgatatttcttacattgaaagcttgattgcagataccctggtaatcgtgttttaccttttaattaatgataagcactggagaactcagtactagagcagtcatagcttcagcttttaaggggcataaacacaatgtggtagctaaatggacattataaatgaatattagaatcatcagaattctttaaatgaaagctttcatcactaatgtttcagtacatttaaataaaagtaggataaaagcttggtagtgcttggtcaattcagtggctgtgttttaaagtctaatttgtaaaagaataagaattcagttatcttttaaattaggataaatttcttaatattacaaaggaataacagtgtggcgtgcccctttagatagatggcttttcttttgcagattgcaaatggctatcagtgtgctgaatttacaggcaaatggtatgggtctcaatggagagacactttctgtagactgacatagattcctcttgggagaatttatagacaataaattatttatataaaaacctaagattcttctcctgtgctttagttttaattttatatcactgcaaaatgccacaagtaatcagaatagtctgtgtttgataggcacgaactacaacaaaaaccctttcagcagcattcttaattgcaccagaccttgagaaagggattacaacagaggtgggccagggtcaagaaagtgttgaagtgcaacccaggaactgccatagagtttgctaagccattgaagggattccaggcaagcaactatcagaaggggtatggagcaggaaattgggccgggagtaggagaggttaatggaggtgtgggcatctgagatgggtttgcaatccactttccagtgatagatgcagatgctggcacattgcaaaggaagaaatacctagaattttattacgatttcttaccctgagcaatcaacgggcctaattaaaaaaaaaagaaacaaactttaatttttgtcatagaagtagtgagtggaatggtggtcactagaggctgggggatagggagagggaatggggagatgttgatcaaagggtataaagtggccaggtgcagtggctaatgcctgtggctcatgcctgtggctcacagcactttgggaggccgaggtgggaggatcacttgagcccaggagtttgaaaccagctagggcaacatagtgagaacctgtctctacaaaaagtaaaagactggcctggcatgttggcacatgcgtgtagtcccagctactcgggaggctgaggtgggagaactgcttgaacccaggagattgggctgcagtaaactgtgcttgggccactgcactccagcttgtgtgacagagcaagaccttgtctcaaaaataaaagcaaaaaccagggtacaaatttgcagttagtcaggaggaataagtttttgagatctattgcacagcattgtgactatagtaaataaaaatgtatcacatattttaaaattgctgagtataaatttcaagtgtctcaccacaaataaattatgagatgatagatatgttaattaccttgatttaatcattctacattgtatgcatatatcaaaacatcacattgcaccccctaaatatatacaagtattatttgtcaattaaagtaaattttaaaatttgaaataacagtagatacacagaaacaaacaaagaaatgtagagggagggcctgtgtaccctttttccagttttccccratgttaatatcttgcctaactagaggacaatataaaaaccaagaaattggcattagtacaatgcatatccatagagcttatttagattgaccagttatgcaggtactcatttgtgtgtgtatatgtgtgcatgtgtagctctacgcaattttatcataagtgtagcttcatgaaaccacaaccactatcaagatacttcactgtcccatcatcagagactccctcatgctacccctgtagagtcaacacctattccctaccccattctgaacaactagccaccactactctattcttgatctctatgattatcatatttcatgaatgctatattaaagtaatcatatagtatgtatcttcttgagattggctttaatttttacttagcataatttccttgatattcatccaggtgtgtatcaatagttcattcctttgtattgctaagaaatattccgtgttatgttatatcacagtttgtttgaccattatccattgaaggatatttggataattttcatttcttgggtattacaaataaagctgctacgaacattcatgtttaaatttctgtgtgaatatgagttttcgtttctctgtgacaagtgcccgagagtgccacttctgggtaatatagcaaatttattttttgttttaaaatgaacagctgaactattttctagaatagctgtaccattttacattcccatcagcaatgtctgagtgatctagtgtctctgcatcctcaccagcatttgatgttatcactgcttttttattttagccattctgatagatatgtaacaatatttttgtggttttaaattgcatttctcttatggctaatgatgtcgaatatttttttgtgtgcttactacctgtatatgctctttggtgagctgtctcttcatattttctgcccattttctaactgtttattgttttttttttctgttgagctttgagaattatttatatactgtagatagtaattatttgtcagatatatggttgggatggcctagggcctcactgcccatcgctgccctagtggtagagtaggggctggggctggggcttccccactaggtctctactggacttctttactggtcatttgaccagagggagcaggctctccctgttgctgttttggggttgcagccgtctctggaacccggcatagggtatattggaaataaaaaggaaaccccacggaactcaccaggttgttgtccctcaagtgctaaggcccctagtcagtttctatctccttttttttccaggttttagagttctttatcacttcccgttgaataacttccagggtatttagagggaaggagtagagaaaaatgagttcactctaccttttttcagaacaagccagcagatctgatacctaagaagccatttggtatcaaagagcagcaggactgattttcctggagatgttatctgatggacagtaagagcattatatgctttgaccttttaatgtcttaccattgtgtctcaaatagcccttgtattatgatggttgtctaagattaaaagcttaaaggtgactgtccttacagccagagcttaaaaatattttatctagcctggaacagaagtgtcgcatggactctgtaatgcactgctcaggtcctcctttaggagctaagggcttatcaccctacttgctgtggtgctgcccatagacaaccctctcccaaaggcatacctccttcatgaggtggcctgcttccagtgactgatcactggagggtaaaaaggcccctcccttctcaccctcactcaggacattccatgctatggtctcaatgtttgtgtacccccaacatttctatgttgaaatcctaaccctcaaagtggggcctttgggaggtgattaagttgtgatggttccaccctcatggatgggattagtgcctatacaaaagaggccccagggagcttgctagtccctccactgtgtgaggacagacagaagccatcatctgtgaaccagaagtgggccctcaccagacatcaaatctgatggtaccttgatgggcttcccagtctccagaactatcataaataaatttctgttgtttatgatattttttacaactgccagaatgcgctaaggcaccccatcttcattattccccacaagctaccattgggacttctccttcagctcacctgcttcctcctctatttccctttccttctgcaggtgttgatccctaaagaattccttttaaacctttcttcaagctaaatgcatgaggaatctgtttcccaggaccttaacctacctcaaaagtgctttgcagatattctatctttttctacatggaattgttcattgtaaggagatcatatacttcctattccagaataataatgtctttttaaaaaatgttatgatgaccatactagatagtaatcctatttgctttcaaaatcttcactttggagaataaaaagctgggatgttatgcatttctctccagtgtttgaaatctataagctaagaactgtagcttggaatcctgttagatttcttgcaactgtttgtttttatgaagagccatcaccaaacacagctggttttgtagattattgtttcagaaagtttactcaaatctgcagtgatatcttctgcagttgctgttaatatttagaccctgcatgctaagtgtattgtattctattgtattgtatccctagcattgtattctccatgtggctctctagtctgagtttatttgtttaatcaggaggttcagaacaaaaacatggctgtggcagtgtccttactcatctataagctttttgcttggctgccagctgattgcaatgtataaacagtagtttgcatgttactcagtcatatacatgtcctgccaagagctggttactctttcacgtatctccttatttatttcccacggtgtctctaaattactatgtggagatctcctgtgcacttaaagtcactcatctgccctctgcttgttcatttagacttcgctacctgaattatggtgaaccatgaaaaaacttaaataagtctaccttctctttttaaaaaaagttactatgaaggtgttatatatttgactgtatgcagtaaatgtgtacctaaagacaccaataaattgaatgtctgtaagcctaataaaatgtaaatgcattaaaagagcttactattcctatggagagtttgttcttaaaggtaaatgataaacctttaattcatgtttaaatcaagcttttaactctattaggttctttgtggaaaaaatgtatgtgacaatgagccagatgaattctcatatttctttctgaatggcactatggttcaaattagctcaattaggggtagggaggggattaataaaagtagactttaataaaattaaggacatttgtttctcatagaagttacttgctgatgacaatctctaagaaaataatgtaatgttgacaaacatttaatgagaaagtgcgtcctcaaaagctttaaccctactagtttattagaagtccaaatgagtacctattacaaatatttacttaaaatatttcctttatattacaacatgtaataccctttaaaaaatgttgctcttgaataacaagcaaacaaacgaaagctcaaagaagctgctactctctatccagagtatatccttggaaagtgatggctcatcttactggttattgtttcatcatgtgatgtcagttgttaatagtgtcttcataggtgttaaaattatgggaactatcttgaaagttgactttttaaaaatgtcagcatttggtgttggggcaaatcccttggtccttttcagcctgagtttcttcatcatcaaaatggctaaagtgatatttatctcagaggtcacatgagatttaattcagttgagagtgctttgtgatctttataggtataatcagatattaggctgtatttctgattttctagatatttcttctgaaaacaaaattacaataatattattccttggcctaatgctttccaggtttggaaacccctnnnnnnnnnnnnnnnnnnnncaattgcagtgccagagaaggcgtgttttgttttgttttgtctttaatcttttttaagagaaaactgaggctccaaggcattatgcaattcacgaattcatgctaggtcatatatttaataagcagcagaccaagggctagtatcaggctttctgactgctagttacttcttgcaggtcagtaatgtaaatactgtaatacgaggacaaagcaggtaatggatatgagtgagtatgaaactatagggagtggtgggaacactggcaaactagagccagttttgatccagagatgactaggaaaagtgcaccatccacacccccctcaacactcccaccccacagcttcagccagatgttgccaagtagtctttctggtccagtatgctaagatcttctgattttttttttaagagaagtcagaaatttagatctttatgtaaaatattgacacctactaaaaagaagaaaagaaagagacagacagacaaacacaaaccaggtagtaccagcactttacctttctctgttgcagcctgtggctgtgaggtgcaccttctccctggttttggatccattagatgctgtatgaaggagagggtaaggcacccaagggcagggattctgccacatgtattgtttcatccccaaagtctagccaggtgcctaaaattaggaaatgcactaggaaatgcctttcaataaagaataaagaacagcaacaacagaccaaagagttcccagagaaaccttggaaacctgagtcagcacacaggcctgcaatgtggagttagttttactcaataatgctgagaagcccattagaaatattcagggagttaataatttctcttattgtttttcaaatggaaatttaggagtggcaaaatgagggtgaaattttaattcatttcttgaattactaaacactattgatcacactaaatacggcatatgccaaacatatttttattaagttttcttcaatgatttctgtctgaatgctcataactttcaggcatagtggtgtgtgaaaatgataactttattcaaagcattctcacttcaaatgcacccatacttaagcaggaattcatttatcttaaaatgtttcagaggatctctttattataaaggaaaaaaatcgccatatgaccctttggttaatgttgattatatgtatgtgagtatgtggtcgtggattcaaacacgtaattctaaaatgtttagaaatgctgcatctactgtattatggacattaygatttttcatgaccaaagcttgttacattattttcctttaaacaatcaaatagaagcaatagtatttaggttgagtcctcacagcaacaacaaaatgccacaattaagaacaaaatcataagggtggatgataggaacctgtatcctatctgtggttggtttgacaagatagagttatagattaatgtaatattttattccacctttagaacatttcatcatcccattttaattaagattaagagttagaggagcacatatctagaaccgtgtcttgcaccgcattttgcatccgggctttggataacctgttgaaagcaaaacaaaacaatctacctcccaccatctcgtcacactctgacttcaagttcagcttcacagttaaataacttgccaacttcgaattagcaataaacagcaactcaagacctgtagggcttataagcaagtgagaagtggtgcttggaatgattacattcctaagcccacaattatcacagttcagaactaatttttatgccttaaataaaaccaaaagaatctacacaaagcacttcattttctgggaaggttaaattaaaattaaagtgttcactggaaagtcatcctctttaaaatgcatttgctaagaaccacttgaggaaagagtagctactgtaattttaatttttcaggtgtaaatccttttactccttacaatagatacagagaggccactagtatttatttttttagtgtgatattttaaaaatcctttttccagacagttcttccaggcttacagattgtatacatttacacaatatgataatttattaaccaaaatgggtagtagctgagagtgcctgaaatggaaacagacaatattccagagagacctaaagcgggcaatggataatagccggagtagcaccttggtttatgtcacgtgtctcctgtaaaaagtccttgtgcttttgcagctctctttgaaacattctgcataacatccaggtcacggtctggggagagggaaagaccgctgggacacctgtagtcgcagcaactgtgttcctacagcatgaagagctgggaggaggaagaggtaaatctccctcttcatctttggcagctcaactgtttgggggcttgtgggaatttcatctgagatccccgttaactttcatatggtagaaatctaacaagttaccttgttgacctttgaggcagcagcagagttattaaactattattattattattattattttgagacagagtctcgctctgtcccccaggctggagtgcagtggcacgatctcggctcactgcaagctccgcctcccgggttcacgccattctcatgcctcagcctcccgagtagctgggactcaggcgcctgccaccacgcccggctaattttttctatttcttagtggagacagggtttcaccgtgttagccaggatggtctcgatctcctgacctcgtgatccgcccgcctcggcctcccaaagtgctgggattacaggcgtgagccaccgcgcctggctggtattaaactattttcccgtgggttctctctggaataatgagtgctttttaaattaaactaaattttttaaaatttctaaacatttaaaaagctggatttctagattctcttagaaaattggaaaacctggcaacactgtaccattattattccttcatgggaacgactggctggagctcagctgcagctgtgatgtttccatgaagtgtgagctgcttatgtgacaccagctcccttcctggttttagtgttttctcacctgtgcggcttgcttgctaggacacttgcatctatccatctttttattggtctccaggctcagattcccattgcccaatggacattttggtctcaatgtcccttccgctccaggttcaacatctccggtgccaagatctttattcccaaccgtgcccaatgttgctttaagtacttgatcggcatgatcttatttaattctctaaaaggtgagtatgcttatcttccattttacaaatggagaaactgaggttagaggcagaattctaatctgaaatggtttgatttcaaagtccattttcagtctcatttctgtctcaggagggtgaaggactgtgcatgtttttcttccttctttccattctttttgtaatgtgcttaggaaaattgaagtataactaaatatgtaatacacttggtgacttgattgcttcctcttcccccacgttctccatcctttaagacatgcgtaactgttaggcttgtaattacccatttccacaaggagagaatcttagctttcatagcaattcagaatatctagatcattgtcatccaaatgaaatacatgtgagccacatacataacttaaaaaaatgtttaataaccacattaaaaaagttcaatggaagaagtaacataaatttaaatagtatattttatttaacccaatatctttaaaatattatcatttcggcatgtacagcatgtaattaatatttgaacattattaaagaatcatattttatattcttcttttggtagtaaatctctgaaatcctgtgtgtattttatactcacagcacatctcatttcagactactcacatttcaggtgctcaataggcacgtggctcatggctactgtcactggcagcccaggtgtatatcattagccgtacatacaaagggagagtaagatagagggatcaggttcctgttatagccaaggcataactcagaatttctaggccctcgttcagacctcctcctacaaaccaatgttatgagccttgagatgtgcaaaaaagagttttggaatgaattatttattccttttttttatggatgcagctgcctgatgtttggtaagccaaagaattggtataattttagtatatctttcctgcttttagtgcagttctagagttttaatggagagagttaggatatgatttcataggaatatgttttatctccctgggtggtgtgtattgccttgcaagcctgaggtgagatcataagtctaaatcagttcccttctagaagttactttttgcctaccatcagggacagtcagtaaacacacagaaagaaggagggtataacattgttgggtatagcagaacttcactgaagaagcaactgaagaacaatgcagtaaagtgtgcaataaaggtgctcaagccgtttcaggcagtgccaagacggacagtctgaatccggaatgaaagcttgttcgatgcgctagtaactgtgatttgtaatacccagagacgaagactaaaggcaatcaattatgtatggcctgttattactttgtgaaaactggtcctgaattgttttattatttgatagtgtttttccaggaaaataaggtttcctttgctaacatttttcactgagatagatgcagaaaaactctgaaccattctagtgagcatgtatttctagctagttcaccaatttgaatttcaggttgtgatgatatggccataaaaatctgccctgggcacattttcggctgatcttagcttaaaagcattttttaatgccacgcgatgggacttaatgactttgcattgtgggttgggtcactctatcaggaaaatgaatccattcggatcctgttcttatgctggaagccctctgaatttcctttattgaaatgccagaaagtactttctaaatacatgttccatacttcagttgttccacggcctcctgttattatttttattctttatagagcacacaggtacttgagctatatttctaaaacaaaaaagaagtgatcctgccccctcgaactttcatttaatgcagacaaattcagcacaattgaaaggtaaggcattaagcaggcactggcaatcaccagagagggttttgggaagttggtcatggtcccagtttaacacacttccccattgtcctgctgctaagccgagctttttcatcacctgccctgcggttctttgccattgctgtggctgacattatgtgcagagctgtttaacttagaaacgggaagtagctttggaaattaactggctcctaagtagtcctgaggtcatcgttttcctgaagagagcagtcaccatttgtttatttatgtagctgactttctgatcccctgaaatacatatttttttaaattaaggtataacacatacatcagtaaaagtttataaagtatgctaatttaagtatatggtttgatgatatttttacatatgtatatccatcatgtaactgccatctagatcaagttatagagcacttttcagcaccctggcaggctcccttgtgctctttccaaatgttttccaaatacggtcccttataatgttaccactgctttgatatctaccaacagcagttagtttcacctgttcttgaacttcatctaaatggaattacacagcatgtagtctctcctgtctagctttcctcaatcaacatatttgtgagttgcatccatgatatcaagattcatgttcctgttggtgagcatctgaattatttccagtttttccagaattctgttttggtctagattctacctaatgtcttcaggacattaaagaggtgacatttgtccaagggcctggagcacagagatgctctatgctgatggaaacctccatcctgtctcccataagtctgtattctcacctgaatgatcagagtagttgctgagtgctttaccttmtgcttctctttcttcttcctaattttaataataataataataataacaacmgctattattatatgtatcaagtactaggcactaacactactctgtattatgtgttatatctcatttaattttcaccaagactctgggaagagttattattatagttttcacgtgaagactttagtaagtttgatggagtccctaagatcacatggcrtattgatggcagagcaaggattcaaacctaggttttctgactagcactatgttcttaatcactacccgtactgacaaagacagggccttgggatctgtaagggaaatgctatctttgagtggaacacaattttgtccattttcttcccccatgacscccagacagctgtaatttttaaaatatcaaatagaatctatcatttccgagatttgaaccttcggtggctgtccttgtcattaatataaaatactaagtcttcattaggcctgcaaggccccacctgatctgctcctgcccccactccctgacctcatcccgcatccactgggccctcctcaatgccctcgggtcattgaacttcatctgttcttgaacaagcccggcttgtccccggcactgggcctttgcatttgccattccttctgccaggaatgctcctctccagatctttttatggctgattccttcttgtaattcaacttgttgcttaaatgtcaccttcctagagagtccctctctgaccgcccctccacccccgtccccattaggaaggacctgtctctctatcacgttgacttactttatttttttcccaacacttactactaccaaacttattttgttcatttggaatattaataattgtctgttttccctcattgtcatattcactctagaaaagtacctggcgcttagtaggtactcaaacgggtattgcctgaataaacaaaggaatggaaaaatgtatgttttcaaaggtctgtgtaactctataagacatttccttatatattttataaaggaagaaagttttattttaaaaatgtgactttacatgctgtgggaggtccaaatttcatataataaaatgaaggcaggaggggagctgggcacattattaattttatgtgtggaagatgctcgcaatcgcgggaattgacttctggcaatgaagcaatttcccaaatgtcagaactaatcatatgatcctggaaagtggttctcttcttgttgtcattgtttattgtttgtttattgcttattataaaaatactagaatggggacactgtttcctgtccagccctggagcatagcatgtgacacaaatcataacaattaacacatatttttatattggagtttaaaaataagaaatgtcacaaggaaagcatatatagatgctcttttatcatcgccaccccattctaacatgacaagcccaggaatcattaacgatcctttgttctgctcaatgcgtggggttgacatggatatctttagtaacgagctgctccttatcttatcataaataacaagctgccactttggcatttggaggctgcagaccaatttctgtaatatcgcattcgccactctcttagctgctgttggatttggtaggaagtttttaatttaaatatctttggtcctcggatgtagatttaaatttcctggtccccaggcaaactttgtcaaagggacttgcaacccattgctcttagaatcttgcatgccaggcacccttgggcgtacataagggttgtgggtgtgatgggcggggctgggactgttgtaccctgtggagcaaagaaaagcagkgttaggagaaatctaacagtgcagttgaggctaggagtggtaaaggattgtgtttctttgctagcctaggcagaatttcttattaccccacatcaaattgcgtcccttgcctctgattcaagcctgcacattcatctcttccttccacctcaggcttttattgatgcttccacctccaggcagtgcacagatgcaaacttctgtttaccgtctctgagtaatgatattacttccactgcccagggataatgcattgcttattaaacactgtagcaataaccattagatggtaaatcaaagggaaacataaaagagtcaaaagcaccgctaacccctttagcaaaaaatgatcagaatttaacagaagtagagttttcctggttaacagtggggagggattaacagcctcactgctgacttgctgtgtgaacttcaaagatttactaacctttctaacttcagttgacaacgttgataagcagaataataattgtgcctacctcctagagttgttgtgaaggttaaatgaaagatatacattgaatcctaagcaaagtgtcttatatgtagcaagagcttaattaaagtttccgtaatatgatatcttaaaagactttcagaggctgaggtgggaggatcacttgaggccaggagttcaggaccagactgagcaacaaagcaagacccctgtctctccaaaaaaaaaagaaaaaaaatttagccaagtgtggtggtacacacctgtggtctcagatacttgagaggctgcgacaggagaatcacttgatccaaggaggctgaggctgcagtgaaccgtgatcactcctatggcacttcagcaagactctgcctaaaaaataaatacataaataaataatgtcttagaagaactgtgttgtcatcttcatgggggtatgctgtccatgaacttagcaacaaacctaggaaagataccttaaaatacaaatgcttccttccaacactataggtgtatccataaaccaaagacttcagtagaaaaacctgtcctgtctytactcagttaccaaattatcttggtttttttttttttttttttttttttttaacaaagccatggccatttgaaaaaaaaaaaaaaaaagccttttaacaagtatcgtttagaatcatggttatattctacacagtgcattgaatttaaggttctcaaggctgtcttccatatactcagttctataaagagcagcctcctctctagaaagttgtttaaaactaggagacttgagatgcaaaatgctgagagattcagctcaaacaaatatatcacctcttgccctttaccttgtcaaggctgaacagtcttgaacaggcctccaggttcccagcccatgccctgctactctccttttatgtatcatgccgatcaaatgctggaagattctttccccttctgtgctgctcgtcagctctcatttgcccttaaaatctcagctggaatatggtctcctctggacagcctcttgtttcctcagatatgctccatatttggttctatgttcacattgctcttggaaatccttcattttattctgtcctgtgattatgtagtaattattcataattattaaatatccatcstgtccactagattgatggctccatcacgtagggattcttttgttcatcacagtattgcacagcccttggcacatggtaggtaccctatcacacaaatggggcaagtgctaaaacttattctttataagaatttattttcatgtggcatataactaaatggttaaaatattacattacattttttctcttatgttgtagcaattgtcatctgctatatttagtttgcctttgtaccattgaaatgatcatgtgctggttttgtaggttaagatttaatagcatctcaaccaacaaacatctgatttttaaagcagtaactgtttaatatactggtttgatagtacaaggtgacattccctctctctctaagaagccttcagtcttcaaagcacatcatacaatttcataaattaatcctgggaataagcgtcatagtaaagatattgattttagaatccggatggaaaagaaggcagagcctaatgtttgaattctaagttgcaatcagatatagtaaatcaccaagaacaaaggacagatacctcaacacctagaatcaggaagatggaagagaattttatggactcaatttcaatctcccttgtctcttcaaagaatcatacctcctagaaagcctttggtccttgtctgattgtttctaagctaaactggggacttactgatttggctctataaaatgattttagcttgccaagaccagcttggtcagggagaccctaacccagcagtgctagaggaattaaagacacacacacagaaatatagaggtgtgaagtgggaaatcaggggtctcacagccttcagagctgagagccccaaacagagatttatccacatatttattaacagcaaaccagtcattagcattgtttctatagatactaaattaactaaaagtatctcttatgggccgaattaaaggaataggttgggctagttaactgcagcaggagtatgtccttaaggcacagattgctcatgctattgttcatggcttaagaatgcctttaagtgattttccaccctgggcgggccaggtgttccttgccctcattccctaaacccacaaccttccagcttgggtgttagggccattatgaacatgttacagtgctgcagagattttgtttatggccagttttggggccagtttatggccagattttggggggcctgctcccaacattagctttatgctcttgcttaggattttgcactagctctgagatgcctattatatcatgttttaagttctgcctgcttttcaaggcaatttgatgttagaccccacttcaacttgactgacttaattccaactgctcacatatggtctcatctctctaacattttactgcaaatgtaatatgaggtacaagtgacatagtttcatcctggcaacaagatgatgaataagacccatcccttccctcaaggagcttatggtctactgaatgaaccaagcaatgtagacttataaagtgtatgtatgctacatgtaaagcactatgggagatattttttwaatggacaagacaagaatggtaagaattaatgagtaagtgcccacagagaactcagaacgttgccaagcacatatcagtgggggaataactgtcagcggctattcctatgatgctggtgaaatttctggcttgagttcttgagtgtgtggtgaagctatctctgacatccagagcccatgaggtagaactcaggataggctggccagctacacaaatttggtttgagaaaaatgagaaataactggggggcatcaaaatggcgatagttgtcagcaatagagaaatttgaaatttgggagcataattaggtagaaagatttactgttggcagtaaggaatccagataatcctattaaccaatacctctccactttggggttttatcttcacagttttcttttctatcagcatttcagactgtttacctattcctccagtttaactgaaagatgtatttaccagtattcagaaaggagaatgtacatagaattaaagcaatttttaaaaaggccaagatctattccagcctctgcaacctcttaatctagtgggaggcagacagactaaagaataaaatactaggctggctttgatagtgatagtaattcattggttttcaaagtgtggaccctggactatcaggatcagcatcacttggtgtggtagactgaataatgacccctcaaagttgtccacatcctaatcctcaggtgaaaggactcaggcctaagttacctcttatggcaaaagggacttcacagatatgatcaagttaagggggttgagaatgagagattattctacattatctcagtaggcctaatataaccacaagggtcgttataagagggagacaggaggtaagcgttagtagtaggagttctgaggacagcagtaagaggttggagtgatgcaagagaagggccatgagccaaggaatgcaggcaacctctagaagctgagagaaccaaaaaaatggattctaccctggagcctccagaaggaacagccctgtcaacaccttgacctgttttgggcttctgaccaccagaactgtaagaagataaatttatgttgttttaagccactaagtttgtggtaatttgttacagcaacaggaggaagctaacgcacctgggaatttatttgaaatgcaaaatctcaggccataatttacatttatccaatcagaaactctgggggtggaaccaatctgtggtttagcaagtcttccaggtaattattatgctcactgtattttgagggctgctgttagaattcagagaaggaattgtacccgtctgtacatgagatagagtataatgttctgccataggtcacatgcttgtttttttcaaccaatcactgtatgtttgtcacagagcttctcctgtggccataggcagtggggcattatgattgaccacagaacccatgaaatttcagggagtttctcaaaggaaagaaaatattattaccagaaggaggatcggatagcttgctggagagacaaaacaaaggctgaccactgtaagtatattactttagtggtcagatagggaaggaaagacattccagcatgaaggaagagtttgtgcaagggtccagaagtaaaaaaacacagaacgtattcaaacacagaacacattcaaaatggcaaaaatgattatagcaacagtatggcatcaagaaggtgtgggaggaggtgaagagtagtgggaaataagcttggaggtccttcaatgccatactcatgagcttggattacgttctgtagtgatgggggcacatacagtggtttctgagcagagagtaatatgaggaatgtgggctttagaaggcaaactctagattctcaccattgcctgaatatcaggcccccttagtactaatctctgccatcctgtatgcatactgaatgttgattctgcatgactccagggattctctatacgtaaatttttatcattatgtgtttgaatgatggttttcacctttggaaaacttaggctttcaaactgttagatcacctacagaaagaaatacatgtatatgcacacacacacacacacacacacacaccccttcatgaaactataccctttattattatttgagatatgttctactatattcaattctattgtagcttttaaaatttctcgttacaatttcctaagttgatgtcaagacccactattgggttctatcctttagtttggaacttactactctaagggaaaggggcagtgttttattcacttctgcatctatcagttcttagcacagttctctgcctatgttagatcaccactaaggcttaaatatcagatccagtgaagttttagccagagctgcgaacattcttggtaccatatgatagcacatttcacttgccaagtattggatgacagattattaagacacatatacaaagctctgaacatttgggtgggtgtattggtaggtgggggtggaatgaagggtcagtagaaatgatgatgcatcttctctgtaattaatgtcaaagcttaagaagaacattagcagatcaattccttataacaccacaatgaaacattttcccctgatcagaactgctttaaatgaaataaactttgctctgtgaattaggcaggtatcattttgggatatgaaacccacaaaactgtcatcaaatacagaatgatgagagctgtgatgctaggttgtacatagaattccagttctggaaaagctgtcatttgaatggcattctcttttcctgcaatatcaagaagatccacagacgctgatttctgggctatggagctgggttagatggaagatgctctggaagggcttccctttggtggatttttcactttctgaaattcatcattttcattagctttatactgtttttgtctttatcatttcaggtgtgaattacaattttttttatcttatgctgtcatcatttgcattactgttgtgatgtagtggctgattacagctctgtatgaagaagtgttttgaggctgtacttgggctcagccagacaaagtacaaagtacaaagatgtctgccatgagtgcaagcttcaggagtggtgagcctatatgtcccatgcttgccatcctcaaacactacatttggacagtcatcaccttcctacccatcagtatgagacttagtttaggccatcctccagatctgtatgcttgcctggtttgtgctgctctcatggttacagagccaggtcactaatgctgctgacattgttgctgccaagggccaaaggctgttacagtgactgctcccattctctcaagtcagcctgtcatctcccccagggctcccatgttgccactgaggcctgtgatgcactagatggctcagctcccacgtatgtgcaacctggaattcatctccttcttaccctgacttattgtccaaaggagctgtcattcacacagcctgcctcagaagatgggtcctggagatctgacatcagttgtgctgagtaacagtggcagccagctcagaaatatacccttgtatctatctgcttgttctccgtcccttcctcatttccttcttctctccctcttccttccctggatggcacattccaataaattaggattatgtaagattttgcctcaggctgtgctttctgaggactctgggctaagccaacatcttagtaagtgtgtgcattacacacacacacacacacacacacacmcaagagagaaggtaaatcggattgagataaaaggagccatcagaggttacttagttaaatatctgtccaagaaggcaaggagtccttgaaaagaagcttatatgtactttcaggggagttggggagactgagtcaatcatggtgttttttgtccaaccctgccccagagagttggtctgacctccacagaaagaggaccctttaagtaaaagccaaatggaaatagaccatgagatgagagattagtaagattcatccacttcctcactgtaaaaatttaaatagtgatggaagctcttgaaggatccctgagtcaaaatgatgttctagtactggaattcaatggtaatacttataaagattaaagtctcatggaagggaaagacaataagcagtgaatagccaaagaaagaaaataatggcagtttatcacaggatacaagtgatacgaaggaaatgaagagttgcaacagagaataacagagtgagacagggagagtccccattgagatctgttagtcagggaaggcctttctgtacaaacggggaggagggagagcattctgagcagaaaggacaacaaatggaaggccctgaagtggaaaagatgtgttcgaagaaatgaaagcagaccaggctgattatatttatgaagcatttactattgactggcaatattcctagcactgtatacgttgtatctcactttatttctaataatccagtgagatatgtaactttccatgtgtaggaactgaagtgcagggaagctaagaagctggcccaaagctccacagttcacatggtaaacagaagacccagaattctgacccaggcttctcatgggaagcagtggactttgagtttataaccttcactggacagtctcctgtagagcaaggctggggccaagtcctggaaggccccgtaggccagggccaagggctttgactttattctgagtgtagcagggaaagcactgaagggttttaagtctaggaagacatgatccatttagtctttttacaagatccctcttgctgctttgtgcagaatgaactggaagggcaagagtggaagcaggacattaggaggctgtggtagaggcccaggtaagaggtgatggtaattaataagcaaccaacagggtatctgccgagatggagtgaaggggaggactcgagggatgttttgtaggtaaaattgacacgtctttcttatggattagaagtggagggtgagggctgagcacaatggctttcatcccagcattttgggaggccaaggtgggagaatcacttgagtccaggagtttgagaccagcctgggtaacatggcaagaccccatctctaaaaaaaaaatagccagacatggtggtgtacacctgtagtcccagctactcaggagactgagaagggaggctcaccagagcccaggagtttgaagctacagtgtgctatgatcatatcactgtactccagtactggcaacagagcaagaccctgtctcaaaaaaggaaagaagtggctgggcaccgtggcttacgcctgtaatcctagcactttgggaggccgaggcrggtggattgcctgagctcaggagttcgagaccagcctgggcaacacagtgaaaccccatctctacgaaaatatattttaaaaaaattagctggtagtggtggcgtgcacctgtagtcccagctactcgggaggctgaggcaggagaattgcttgaacctgggaggtggagattgcagtgagctaagatcacgctactgcactccagcctgggtgacagagtgagactctgtcaaaaaaaaaaaagaaaaaaaaaaaaaggaaggaagaaaggggagaaggagaaaaggcctggtcagagatgttgccttgggaccttagcaaactttcacttttattcaacccaggcagtagagggtgacagtgttgggcagaagggtattatctgcatttctgcatggaacatcccagcatggctttcatgccagaagtactggggcagccagggctgctgctgccttgcagagcccttggctatgaccccctgggaaaggaaacacccttctccaggaggacactagagacagggtccatggctaggcattgtcctcaagagggaggccctcagcagagaggaagagcagggtaccatgggagattgtgtgagtgagagcacgcagggaattgctaaaataggggggctgtgaggtgttaatgtgacctcatttgtatctaaacaggtatttgtagtatgcttaaatttatgtcattttttttactattggcaactgctcagaaaggttgaaattcagaattaaaaggagtcatgaagtcaggaaaagtgctaggctaccaggtggctacagtttatattgaggcacacacatttagatttctcccaytttcctgtgtcatgctgacttcacctagagaaagaaaagcatccagtgtaaatgtccccattcccccatcttttcctgagatggacccaataaatgagtgggagtggtctgagacctgctgggcatacatttctggaaccracatctgggagttatgagtaggcagagaggagattttcattttctgtgataacttcccacagtaagtaggtgggagggtgaggtgattgatgagctaaattagatagaaagtggctcacatcagattctaggtgattgctcctgcctctcaactcactgtacttattttccattccactcatttagcaaatgatcatggtctgtcttgtgacattccttatattgttgcttcattctttacattttttgtggtgtttttcccctcttctttcttcagctacgtcagttactccttagggacagaaaagatgttgtgtttattttttttatccttcttatgctttatacagagtaaatgcacaatgattccctgttgtttgactgatagttgctgttggagatggaatgttttctaaagaatgttgctgaatttatcttgtcttagaaacgtggaaagtagggataaggaagacgctcagtgcatttcagtttaaaatatgcagcttttgagtagatgaatttgagataactctgttctggtcagcatagctcagccacagaaatggtttagtttttcatagcagtgaaacttcctttctctaaacagcagatgaggttgaatcacatgaaattgccagtattggagcaacaacatggcaatatcatgtggctcaatctaataagacagatgagctgacaataatttattcctttgactaagtccgagatggaaatgagctaatgggaaggaggcccctcttctgctgtcacagcttgcaggagagagaacagcggaatgcagatcctgggacagagggggtgatggcaggggcagcaatccctgaatgagcaatgattcttgtcatgagttggcacttctgtggttggcacatccttcctgctctgatgctgccctgagaccctttagtgtcatctaaacagaagtcatgacgggcccagaagggtcaggcatgatccataggagttataacacccatccgctgccagccctgtctgccctgsagaactgccagaggaggtaggacatggcagctaatgtcactacttcacaattttcttctatttccctctttgtctctactacacccaataaagtagctcctcctcctttttccctctttattaaaccctgagttttgagcgctttgttcagtctgctgatgtgggaaggttggagaaggctggcattaactgttttttctttaattcctctggttaactctgaagtatcttcttgattcctttagagaaactcagattccccagctggatcacatgggaatgaagggacacttttgccttatttactatgggagcaaagggagcccaatttcagattggaggagagagactgggaagaggggagcttgagaagaagggaaatctgttgttggaaacaggagccagagaagtccagaagagcaagcctaagaactgaattaattgagggcaagtaaatcatcagatgtattttcatcatttgatacagcaagaaatattttcaaattttcctcatttgatatagcaagaaatattttcaaaaacccaatctgttctggattttgtcattactgaaagcatgatcagagaatgaatttctggagtcagaaaagtattcgaaatgggaagacatgcttggcttaatgtggttacaactctacacaacccatagctgtagatctaaggaagagccaaagtcatggtattaagaaaaataaagatgtatttaaacattgttgcaccctaccttcctttttattacctgtagatagaacggttgtgctttaggctctttagtcattcatttcataatgaatgtgaacctacctgatgatgcacatgatctcatttgttccttgtagcagccctgagagttaaaaaatggcatacccagtttatagatggagaaaatgaatttaagagggattcaaaaaactcrcctgtgaccacacagattgcaaatcagttgcagagttggaattccaacccaagtttgtttgattctagaaccagtgcttttcagactatgtcatgctttatttctctttactgcaggcccctgaaaaaaggagaagtagtcaagtgaaatacctgtaaagaaaaaggcccaggataggccactgccccaggctcaaagactaaccctgaggcttgggtttccctaagagtagaagtgcagaatctgaggctccaccccataatcggaaacggcattttaacaagatcaccaactgaagcagaatttgaggccccactctagaatcagaatccacattttaacaagactcccaagaaatctgtagccacgttaaagttctagaagcactaccctaaccaccccaaagctgcttctgtctacttccttcatcttgggttctttaaggacctggctcaaggaaagtacatggttgatgattgcccaggtgttaactgacaagacaatcataaacaacaggagtcaggtgtattttttctcttttcctttgacaccgcctcttctctttccactctttttcacttgcctgtatgacaatgaagtgagaaaagaatgaaagaaagagcataaaattaaggaataggaatttctgacaagggttttctgtgccagcatcatgcctccttccaaaattgtgctaagcaacatggttagcaatgactctgtctttttgtttttgtttttgagatggagtttcrctctcgttgtccaggctggagtgcaatggtgagatctcggctcactgcaacctctacctcctgggttcaagtgagtctcctgccccagcctcctgagtagctgggattacaggcatgcgccaccacacctggctaattttgtatttttagtagagatggggtttctctatgttggtcagcctggtctcgaactcccgacctcaggtgatttgcccatctcagcctcccaaagtgctgggattacaggcgtgaaccaccgcacccagccacaatgattctaacagagcatgccagcatcccccactgctcagcacacacttttctgaattattacagcatctgcaattgtttggaaaactgagcacatttgcttgtttgttcaatccagacaatagctgtgtaggttttatttgtatttcacacacactcatacactcaagtttcttaagggtggctgagcagaagtatgatacatttcaacttttaaggacaaatttgaggaaaccgccattgactgaacaccagggttcagagtggctcattttggtcagaatgctgaacttgccaccggtaatgctgactgctcttcaccacccaggttcactctcagctctgagaactatttgcttccgcttccagcaacagtgaaaattagcttacacaattttcgctccctcattttttaccccgtgtgtgattatgaatgatctgtgaagcagaaagaagacaaaagaattgtataagctgggtctaccctgtggtctcaacagtaattcagtaaatgtgacatgggtgtcaacaggaaactcatacacccatcatcagaccgtcatgttgatgatgaaaaacaagtccgatttctttcctacagggcttactttccaacctgccaatatgtaaattcttcagcaggagttaataaaggaaatcctttaatagaaattcaggtccctttttaaaaataaaaaaaaaaaaacaagtattcagagcactggaattttcagttaatagtggatctggagaggaaacatttctttgctgtccctgcctccatggtaaaagaaaatattgaggaaggaagaaatgagattcaaactttaagataatttggagagccaaatgatattatatacacaggtgtggaatgaggaatattttgtttcatgtgtcacatctttcattcatcaaatcactgtccttctcaagggttcattaagaaaacatgttcttcacagaaacagtgatgaaacaacagttgataccaccaggtaaaacaaaacagataatgggactacctctttgtctcattagaatatcaccctgtgacattatgtttcattcctttttatagagacatggtttttcgtttgtttgttttaaagatagtgtcgtctttggatctggatttgaggtggtgagcttgcattgggttgtttcaaagtatgttctgaggccgggtgtggtggctcacgcctggaatctgagcactttgggaggccgaggtgggcagatcacctgaggtcaggagtgcaagattagcctggccaacgtggtaaaaccctgtctctactaaaaatacaaaaattagccaggcatgatagcatgtgcctgtaattccagctacttgggaggctgaggcaaaagaatcacttgaacccaggaggtagaggttgcagtgagccaagatcccaccactgcactccagcttgggcaacagagtgaaactccgtctcaaaaaaaaaaaaaaaaaaaaaaaaaargaaaaagaaaaacgaaagatacaaagtatgtttggaggtgttatcctgaagaaagcatcttgcttcaaatgctttatgaaaatatttagtgaagttaataaacggtctaagaatttccactgtgtagaaagagttgatttgatttcatttcagaacagtcttaatctgaaattggcattggtaatgatttgaatatgtgtaattctcttagcctaagatgtggaatatatgtcaaattatatgttttatatcaacttgtaagctactggtgagttgtgagacaatttagggattgcttttagtgaaattatatagaatagaaaatatgagagttcatttaatttggtaagagttttgtaaatgtatatgcatacacagtcatattacagatagatatagaaatacttttcactgtgggtcatattcaaaaaaggtttgaaaactcctgccttgatgaattttgacatggtcaaaacatggtatcagccatgattggcacactaaaaattttactctacataaccaacaagcttgtcattgttcttttgatttctcatttgtttggggattttgaaatggctatacttcttttgtaatctttctctctttagtctgttcctcctggagacagtgattagttgtgaatgagggaaataaagccatacttcaagttcagcatacattaactgggcatattttcagaggagaaaatatttcatatatcctttaaaattaataattctgacatgtgcctgcctcatggcttttcagttaccatgactcaccttaatttcaccttaatgccactgtctgacattagatgcctctccagagagtaagaaaatcattcagaaattaggtgcataaaggttattaaactaatatttaaagttctggccctgcacattttactttcctcctaattaaatgccatgagtagaaatgtatgatcctcagtatgtgcacctgcttgaattcgtgtccacttgaaggacaataaagatgctgaggaattctcattttatttgcagcctttctcctgggaatattacttacagctaccatcagtaaccataacttaagccaaagccgaagacagaattttaaaaacatgaaacacatagagatttccttcttttttggaaacttctgtaacttacttcatccccaaataactaagctctgtgaggaataggtgaaaaatgccaataatactctaactttggaacttcaagaatggggctatgttatttgatattattgataaatttcaggcctcatgtcttgggcatcctgtaaatgtaggtgggaaagtaaaacattatcagtggactggaataaatcttatcaccacaaaaacatgttcctaatgctactgcgtcttttcagttttgttcttaaacctgagggttaatcactcttgttgacagacttggttgctgctacacacttttttggtatagctatattagtaagaactcttggttccaggtctgaaacccagtcctaataaactggcttaggcaacaaagggcatttattgattcatgtaactgagaagttttaagtagttttggcttcagtcttaggcaggtcttcattacgtggtgataaccacattgaatctttcattctatccctttaccaaccagcagcaattctctttccagtagtgttcataaaatccaagtactgagtctcaatggaataatgtagatcacatgctcatttctgaaccaataactctggccaatgggatgaacagggactgaccagacctgagtcacattcttatatttatattctaaaggcaggaggaggagaaggttctctaaagaaaaaagatagtggctattacaaagcaaaggttttatgtaaattttgtatgaggaaaaatgggaaatgttactgcagaggttttctactggctatttcaaataacttgatatcattaatttttaaaaagtggtaatattaactaatgtccacctgagttatcaatttaacaaatatgtagtgagccaggcatagacattaatgtctctgagcctatgaattgtgtgcatgattttgaacaagcgtctgtaatattttattaaatgattttcatcaccctggataataaacaggtgatttgacttagcagaatgcaggtgctatttttaatacttagtgctctctggaggccttccaaataataatatcatctttaaaagctttggattccccaaggagcaataaaattgtgctgagtattgtctgtgataaataacacatctcccttctccactcttccatactcctacttgagaaagcttcagatttcctgacattatctgagggttgattgcctagtgaaggtcaatacttctttgttttccattactacatgtttctttgtgatcataccaaaatgatgagaatgtgaccagcttttaaaatattaaaaatcagggaaaataaaagcatgaatacatcaacaaggagcgtaacttaagattttagtttctaaagtggaaatagcttaaattctttcctgaccagtggagttcagggctaccaacaaaggactggaggaaacaagatcccagaggaaaggagccacagagatgtaagttcaacatactgcatggaattttcccttgaggcctttttgtacactcccagggagagacaacaaaatataaagctgaaaatatctgatacaggagtaaatggcaaagcagatattgtagcagtctcagtgtctcacagagttcagggctttcaaagaagtaggaccatggaaatactcaaggtccttgaggcccctgaagaactacaacctagggtaagagcaaactggaaatataccagcctcaactggattaagatgattttcctgtactctatctgcctgccagaagaaaatcaaatcatctttggagaaagataacatcattcaaaacttgtacaatttccataaaaagtgtatctgtcattcactagaaagtagtaggcatgccaggaaacaagaacaaatggccaataatcaagacagaaaaccaaccaaaagtaacagatccaaaagtgactgagaaattggagctataagatctatagctataatctgtttcagataagagattaatatgttcaagaagagacagagaatttcaccagagatctagatcctatgaaaggaatcaaatgtacaacatgaaagttaaaattacagtaagtgtaatttaaaactaagtagataggtttaataatagagttgacacaacagaagagaggattcatgatctggaaaatagatcaagggaaaatatccagattaaagcagagtggaaaagagaatgcaaaaataaagaaaattttataagagacatattggttagtgtaaaggtctgtgtcaggcaattggaggcccaagaggagatttcagggaagatggggcataagtattatttgaagaatagcagtaaagaattttccaaaattaatgaataacatcaagccatggattcaagaaactgtgtaagaaaaaaaaaaagccaaataaaatatggaggcatattgtagtaaaactgcttaaaaattgaagacaaataaatgcatcttaaaagcatccaaaggaaaaaagatatattttcaaaggcacaccaatgagacataaagctaatttttaaaccaaaacaatggaaccaagaaaacaatgggatgccatggttaaagtgccaaaagaaagtaattgccaattcagaattttatacctaccgaacacatccttcaaaaaggacatttttagaaaattaaaactaagataattaattatcagsatatctatatcaaaactattaaaaggagctcctcagtcagaggaaatagtcccagttsaaatcatgtaaatgaaggagggcatgaagaacaccaaaaagtataaatatataagtaagtgtctatgaatatggattgtttaaaacaatcaaagtaatgtttagtggagtgtaagtcctataactaaagatagaacaatttaagcactcattgacagtaactgcagcagatgcaaattcatcaaatattttatatccatgagttcataacattaagaataattataaccgattggttaccatggaaagatgttagtgaaccaatttgttgttttgaaaaatggtatacaaatgtaaaaaatcaagcatttgttccacatctcttgtatgactaagtaaacatagatrggggaattttctcttgataataggattcctgctaataaatgttttaaaagtgtaatattcttatttttttattttaatgaattaacggayccaggccctgaatatttatgggaaaagagaaaagaacataaaccactagccatgaggtaatcttaccaaaaacaaaacaaatgaacttgaatctgcatgcctctagatctaactgcaaacaaacagaaattacagctaggaagcattttatttaatacaatacccatgggggaaaaaacatcagagcgtggaaaacttcagttccaacaagcccctttctccaatgcatagatagcaagggggcaaaaaaaaaaaagattgagggagaatcaataggttaaattaagcttaaaggacaaataaaccaatcacagtatgcagaatttatttggctcttgatttcaaaatacctataaaaatggttatcacatttgagacatttggaaatttgagtatttccagagtatttgatggtattatgcattatttatttattgagacagagtctcactcttgtcacccaggctgctcactgaaacctcccgggttcaagtgattctcctgcctcagactcctgagtagctgggactacaggcacacaccaccatgctcggctaacttttgtacttttttagtagagatagggttttaccatgttggacagactggtcttgaactcctgacctcaagtgatccacctgccttgacctcccaaagtgctgggattacaggtgtaagccactgcgcctggcccattatcattattttttcgtatgtgtgataatgacatcatagttatatattataaaaagcatactcatcttttggatatacatacagaaatagtcataagaaatgtaatatgatgtttggaatttgttttaaaataatatatttggagagaaaatggatggggatagagatggaacaagattggtcatgagctaatgattgctaaagcaggatgataaatatgaacgtttcattagattattaagtctatttttgtatatgttgggaattatccataataaaaagcttgaaaaataaaatatttgtggaattaaaataaaggcaacaaacaataacaggtagaatgagagtggattaaatgaagttaaaataatgtgaaatccttatccagacaggataaaagtatcaattatggtagattctaataagtcaagaaatcatattttcatttccagggtaaccacttaaagaatgtacagttaccaagctgatagagggggaaaatggataatataaaatatatttgattaattgaagacaaaaagagaatttaggaacagaaaactgtgagacaaataaagaatatattaagatagtgataagaatataaatataaccttaattatattaatacaaaacactaaatacttctatttaaaaacagattattagactggattattaaaacaagacaactataagctaactatgtgaggtacagtctaaatataaatccatataaagattcaaagttgtaaaaagagaaacattgtgcaaacacacagtattccaaaagaagcagacatagctatatgtataggtacatatagcatggtctcaaaatatttgaaagcaaataacagcactaaaaaagagaaatatacaaatcttcagccttagttgggattttaccatacctcttcaggtagttaatagaatatgaagacaaaatgtcagtaaacgkctgggcctggtagctcacacctgtaatcccaacactttgggaggccgaggcaggcagatcgcttcagtgtaggagtttaagaccagcctggaaaacatggcgaaaccccatctctacaaaaccaaaaaattcagaaggctgaggtgggaggatcacttgagcctgggaggcagaggttgcagtgagctgtgatcatgccactgcactccagcctgggcaatagagggagaccctgtctgaaaacaaaacaaacaaaaaagtcagtaaacatatagaagattcaaacaccacttgtaacaaacttaatcttatgtatagaacactgcaacaaccaaataagcatatacatttttaaagatttagtaaatataatatatacctagacataagcacttctgaacaaatgtcaaaggctttaaaccatagagtttatcttctgttcacagtagtattaaggtggaaatcagtaataaaatgataatgatagaattccaatatttggaaattaggtaatattttcttccctatgtttcaaagaaagtaatcacaacaaaaattaaaaatatttctgataatgaagatataacatatcaagctttgatgttgcagctaaagcagtttttatatggaaatttatagccttaaattcttagaaaagaagaaagcctgaaaattagtaatctagtaatcagtatcaagaatctaaaaaagaaacagaataaatgcaaagaaagtagaagaaaataaagataagagcagaaattattgaaataataatcagaaataaaaaagcactaaaaaagatattagtaagattttatgccagtaaatttgaacatttaaatgaaatggttaaattccttaaaaatacaactaaatttgatatatttttagggaatctgaattatcctatatctattacagaaattagcttcataattagaaatcttcccacaaaaaagagcccatttaaatttaccagcaaattcttccaaacatttaaggaagaagcaatatcagttatatgtaaactcacatcattagaccagcataaccttgaccccaaagatgaggggtattaaatgaaaataaatccacagttcaatttttttcatgaagataaatgaaaaaaaaatcctagccaaaacattggtaaatcaaatccagtgatatataaaaagaataatatatcattatcaagttgggtttgttccaggaatacaagctgattatttgaaaatcagtcaatgcaacttaccatattaatagagtaaaactgagaaaccatatcatcatctcaatagataaggggaaaaaattgacaaacacattcattcatggtaaaatctcagcaaaatgggaatagagctgagcttccttaatcagataaatatttattttaaaaaactacagcaggggccgggcagggcggcctgtattcccagcactttgggaggccaaggcgggtggatcatgaggtcaggagttcgagaccagcctggccactatggtgaaatcctgtctctaataaaaatacaaaaactagctgggtgtggtggcaggtgcctgtagtcccagctacacgggaggctgargcaggagaattgtttgaaccccaggagcttgcagtgagccaagatcatgccactgcactccagcctgagtgacagagtgagactccatctcgaaaaaaaaaaaaaaaagtcctacagcagacttcatacttaatttgaaatattaacaattttcttgttgagatcataaatgtgtttattatttccatttttattcatcattatattagagaccctagtcagtttaatataatcttgtgatgggcaagaatctgtgtttttaacaagccacaaggtgacgtttatgcattctagtgtggataacctcattactacatgggctaagatgtgatttgcttcttagtttgaagtgaccacagcctaaaagttggaaaggtgtgaggagaaacacatttctgctctcaactcgggctgccattctggcaacaccttggatcagactggacatggatcttgccactttcctttaaaaattgtttttgtttaccaatacgatgttcaccagatttcttactaatttttttttagttgatcagaagcaagtaattccacatgcatattggcacaatttacttttatttacctacagttgaattttaaattgtagtggygaattagcatatttaatttttttaatagatggtatttgaatatggctgagccctcttacaatatcagtagtcaatttgtagattatataccgtgggccagtctgatcatggtcctagaaaaataattataaatagtgaaagtctagtgtaatgcatttagtttccatgatgaatgttgcctctcactaacctggcattattaaacagtgaaactattttattgatcttgtttttcatatctgctcttttttcgatttttcttagaaactgatacctgctcctaaaacttaaacattgcataagcataaaatgaatagcagaaatcccctatacttgcactccaaaaccatatttcagcagtaaccattgacacttttgtcccatcctttttacctatgtatttatatatacttttctatattattttcaaagagtcatcaacttggtatctagtctttcaaaatccaagtgtaaatattgaaaccatggttaatccttcctgtcaaatttgacagataggcagtcaatacaccaaagtcttaggtatttgcaatgcttgttatttcacattgttttgtttgtttaagggatcaagcaatgattttgggaaagaatgattaccaccaatgtggtataacagaactgtttcttttgttcccagagcaacgttcatacatattcccacaaatacatttatgttctcatccagtgaatcactgccaggaacagggagcacatatactactgctgatgaaaaatggctgaggaggtgaataaagcaatttacaatatatcaagctaagagtaatggtaatgtatttttataagaagatactatttatatttaacatcaaatatagatttaaatttttgatttctctattccatgaggcataaacatccccatactgaccattgtggaatatgattaagaaccatgacagtttttgaaagagaagtattacgtctactgagataattctctctaactataaaagcatcagctgatttggagtacaatttatagaccaaatcaaatactgcaccttaggactttatgtgtaaaatgtaccacagttctcttacccaattaattaccaacctaaatatctctcagatttgtcacattttaccatatcttctgttccaattgcagtttaaattatcatcattgctacartagcctcttaattgatacccttgcagccattattgtctccttccaatccattttccacactgtagcttgacagagatttttaaaatgataattgaatcttgccactgtcctggtggaaaccattcatttccaccatttaaaagcctcccttatagtcatcatgggaggaggttccaagatggctgaataggaacagcgccattctacagctcccagcgtgagcagtgcagaagatgggtgatttctgcatttccaattgaggtacccggttcatctcactggggcttgtcggacagtgggtgcagcccacggagcatgagccaaagcagggcgggacatcgcctcacctgggaagtgcaaggggttggggaattccctttcctagtcaagagaagccgtgagagacggtacctggaaaatcgggacactcccacactaatactgtgcttttccaactgtcttagcaaagggcacaccaggagataatatctggtgcctggctcggagggttccatgcccacggggcttcactctctgctagcacagcagtctgagttcgaaccacaaggtggcagtgaggctgggggaggggtgtccgcaattgctgaggcttgagtgggtaaacaaagcggcctagaagctcgaaatgggtggagcccaccgcagctcaaggaggcctgcctgcctctgtagactccacctctagggtcagggcatagctgaaaaaaaggcagcagaaacttctgcagacttaaacgtccctatctgacagctttgaagagagtagtggttctcccagcacggagtttgagatctgagaayggacagaatgcctcctcaagtgggtccctgagacccaagtagcctaactgggagatacctcccagtaggggccgactgacacctcacacagccaggtacccctctgagacaaagctttcagaggaaggatcaggcagcaacatttgccattctgcaatatttgctgttctgcagcctccgctggtgatacacaggcaaacagggtctggagtggacctccagcaaactccaacagacctgcagctcagggtcctgactgttagaaggaaaactaacaaacagaaaggacatccacaccaaaaccccatgtgtacgtcaccatcatcaaagaccaaagatagataaaaccacaaagatggggagaaaccagagcagaaaagctgaaaattctaaaaatcagagtgcctcttctcctacaaaggaacctagctcctcgccagcaagggaacaaagctggatggagaatgactttgacaagttgagtgaagaaggcttcagaagatcagaataacaaacttctccaagctaaaggaggatgttcgaacccatcgcaaagaagctaaaaaccttgaaaaaagattagacgaatcgctaactagaataatcagtgtagagaagaacttaaatgacctgatggagctgaaaaccatggcatgagaactacgtgatgcatgcacaagcttcagtagccaattcgatcaagtggaagaaagaatatcagtgattgaagaacaaatgaatgaaatgaagccggaagagaagtttagagaaaaaagagtaaaaagaaatgaacaaagcctccaggaaatatgggactatgtgaaaagaccaaatctacgtctgcttggtgtacctgaaagtgatgaggagaatggaaccaagttggaaaacactctgcaggatattatccaggagaacttcccaaayctagcaaggcaggccaacattcaaattcaggaaatacagagacaaccacaaagatactcctcaagaagagcaactccaagacacataattgtcagattcaccaaagttgaaatgaaggaaaaaatgttaagagcagccagagagaaaggtcaggttacccacaaagggaagcccatcagactaacaacagatctcttggcagaaactctacaagccagaagagaatgggggccaattcaacattcttaaagacaagaattttcaacccagaatttcatatccagccaaactaagcttcagaagtgaaggagaaataaaatcctttacagacaagcaaatgctgagagactttgtcaccaccaggcctgccttacaagagctcctgaaggaagcattaaacatggaaaggaacaaccagtaacagccactgcaaaaacatgccaaattgtaaacaccattgatgctaggaagaaactgcaccaactaatgggcgaaataaccagctaacatcaaaatgacaggatcaaattcacacataataatattaaccttaaatgtaaatggactaaatgctccaattaaaagacacagactggcaaattggataaagagtcaagacccatcagtgtgctgtattcaggagacccatctcacctgcagagacacacataggctcaaactaaagggatggaggaagatctaccaagcaaatggaaaaaaaaaaacaagcaggggttgcaatcctagtctctaacaaaacagactttaaaccaacaaagatgaaaagagacaaagaaggccattacataatggtaaagggatcaattcaacaagaagagctaactatcctaaatatatatgcacccaatacaggagcacccagattcataaagcaagcccttagagacctacaaagagacttagactcccacacgataataatgggagactttaacactccactggcaacattagacagatcaawgagacagaaagttaacaatgatatccaggaattgaactcagctctgcagcaggtggacctaatagacatctacagaactctccaccccaaatcaacagaagatacattcttctcagcaccacatcgcacttattccaaaactgaccacatagtcggaagtaaagcactcctttgcaaatgtaaaagaatagaaattataataaactgtctctcagaccacagtgcaatcaaacaagaactgaggattaagaaactcattcaaaaaccgctcaaatgcatggaaactgaacaacctgctcctgaatgactactgggcacataaccaaatgaaggcagaaaaaaagatgttctttgaaaccaataagaacaaagacacaacataccagaatctctgggacatatttaaagcagtgtgtagagggaaatttatagcactaaatgcccacaggagaaagcaggaaagatctaaaattgacaccctaacatcacaattaaaagaactagacaagcaagagcaaacacattcaaaggctagcagaaggcaagaagtaactaagatcagagcagaactgaaggagatagagacacaaaaaacccttcaaaaaatcagtgaatccaggagctggttttttgaaaagatcaacaaaattgatagaccactagcaagactaataaagaagaaaagagagaagaatcaaatagatgcaataaaaaatgataaaggggatatcaccactgatcccacagaaatataaactaccaccagagaatactataaacacctctatgcaaataaactagaaaatctagaagaaatggataaattcccggacacatacactctcccaagactaaaccaggacgaagttgaatcccttaatagaccaataacaggctctgaaattgaggcaataattaatagcctagcaaccaaaaaaagtccaggaccagacggattcacagccgaattctaccggaggtacaaagaggagcgggtaccattccttctgaaaccattccaatcaagagaaaaagaggaaatcctccctaactcattttatgcggccagcattgtcctgatatcaaagcctggcagtgagacaaccaaataagagaattttagaccaatatccctgatgaacatcgatgcaaaaatcctcaataaaatactggcaaaacaaatccagcaggacatcaaaaagcttatccaccacgatcaagttggcttcatccctgggatgcaaggctggttcacatacgcaaatcaataaacataatccatcatataaacagaaccaaagacaaaaaccacatgattatctcagtagatgcagaaaaggcctttgacaaaattcaacaatgcttcatgctaaaaactcccaataaactaggtagtgatgggacgtgtctgaaaataatgcaagctatctatgacaaacccacagccaatatcatactgaattggcaaaactggaagcattcactttgaaaactggcacaagacagagatgccctctttcaccactcctattcaacatagtgttggaaattctggccagggcaatcaggcaagagaaagaaataaagtgtattgaattaggaaaagaggaagtcaaattgtccctgtttgcagatgacatgactgtacatttagaaatccccatcatctcagcccaaaatctccttaagctgataagcaacttcagcaaagtctcaggatacaaaatcagtgtgcaaaaaatcacaagcattcttatacaccaataacagacaaacagagagccaaatcatgagtgaactcccattcacaattgcttcaaagagaataaaatacctaggaatccaatttacaagagatgggaaggacctcttcaaggagaactacaaaccactgctcaatgaaataaaagaggatacaaacaaatggaagaacattccacgctcatgggtaggaagaatcaatatcgtgaaaatggccatactgcccaaggcaatttatagattcaacgccatccccatcaagctaccaatgacttccttcacagaattggaaaaaactaccttaaagttcacatggaagcaaaaaagagcccacattgccaagtcaatcctaagccaaaagaacaaagctagaggcatcacgctacttgacttcaaactatactacaaggctacagtaaccaaaacagcatggtactggtacaaaaacagagagataggccaatggaacagaacagagccctcagaaataataccacacatcgacaacaatctgatctttgacaaacctgacaaacacaagaaatggggaaaggatttcctatttaataagtggtgctgggaaaactggctagccatatgtagaaagctgaaactggatcccttccttacacgctatacaaaaattaattcaaggtggattaaagacttaaatgttagacctaaaaccataaaaccctagaagaaaacctaggcaataccattcaggatataggcatgggtaagggctttatgactaaaacaccaaaagcaatggcaacaaaagccaaaattgacaaatgggatctaattaaactaaagagtttctgcacagcaaaagaaactaccatcagagtgaacaggcaacctacagaatgggataaagtttttacaatgtacgcatctgacaaagggctaatatccagaatctacraagaacttaaatttacaagaaaaaaacaaacaaccccatcaaaaagtgaacgaaggatatgaacagacacttctcaaaagaagacatttatggagccaatagacacaggaaaacatgctcatcatcactggccgtcagagaaatgcaaatcaaaaccacaatgagataccatctcacaccatttagaatggcaatcattaaaaaatcaggaaacaacaggtgctggagaggatgtggagtaataggaaaacttttacactgttggtgggactgtaaactagttcaaccattgtggaagacagtgtggcgattcttcaaggatctagaactagaaataccttttgacccagccatcccattactgggtgtttaccaaaaggattataaatcatgctgctataaagacacatgcacacgtgtgtttattgtggcactatttacaatagcaaagacttggaaccaacccaaatgtccaacaatgatagactggattaagaaaatgtggcacatatacaacatggaatactatgcagccataaaaatggatgagttcatgtcctttgtagggacatggatgaagctggaaaccattctgagcaaactattgcaaggacagaaaaccaaacactgcatgttctcactcataggtgggaattgaacaatgagaacacatagacacaggatggagaacatcacacaccggggccacacaccggggcctgttgtggggtkgggggaggagggacggatagcattaggaaatatacctaatgtaaatgatgagttaatgggtgcagcacactaacatggcacatgtatacatatgtaacaaacctgcacgttgtgcacatgtaccctagaacttaaagtgtaataaaaataaaattgaaaaaataatagtcatcatgactggtgtaagatgtttctcattgtagttttaattttcccaatgtgatttagagtccaaccaagagcaacagtgaagtgctctttagacgtcagattatgatttctttcttcaccacacaacaaaaaagaaagagaaagaaagtcatctctcagtcgactcttggctcttagttcctgctgacgttggagaccctcatgggatattccaagtgttagatagggtgggaagaagggaagagggaaagcttgaaacacaactctctttatttttcttcttattcaagtagtatctttttacctttggaattcggaaagcagtgatgagggtaaaaaaaaaactgccccaaaacttatcattcagagataatcaccttatattttagtgtagtttaatctttgttttttaaaaacattacaaagtatatattttttgctttgtctatagggattcttgttgttgttgtaattgcaaaagcaacgcatgttcactgttgaaagggttggaaataatcaataagaaaaagaaatgagaatgaaaattgccctcaggctcaccaaataaacaccaaacagtgttgacattaaaaaaaaaaaaaaaaagaaaaagcctctcctgattctcccatcttgctcacctggtttttgcacgcaaactacactgccctttttcctcctcaaaatctctttctttctgcctcccacagagcatttgcacattcttgttccctcagccccatggaagtttgttttcttcatctccagtggcttcattttctctcttcagatttcaactcaaatgttttctcctctccaaactaggcgaaccccttatgggcacctgtcactgctctgcattactatttcctcactgcctttctccccaacaagatagtgagctctgggtgttcagaaaccacatataatatgtttttgtccagttgccagctcagcttggcatatgctgtttgttgaacatacaaaagaatgtatgtaaatttgttaatagaatggagataagatgattgcagctgatgatgctatgatctgtgactaattatgggaaataacttcaaagggacatcaagggcagaagttctgwtgaaatataaatgaaagggctgatttttcagacaaggtaattgaggctcataagagttaagaaattagcacatgaaatcacagccgctgacagagccagaatttcaacctaggtctgcctgatagcaccactatgcccaagagcagttacatttataaagcctttaaataatcataaatgctgcatactctatcctttggaaaattcatgaggaccattatgaatattaaagacagacaattcctgaagtaaggaaacctgcttaagttaatgttaatatccttttcatttggcaaattccctgaatggaattcaccttggcaagtgtggctgtcatttcttcatttattcctttgtccttagtttgctttttctgtccttactacattgattataattccattgctaaataattccgattataattccattgctaaataattctttccaaagaagacatttgccaaatacttccacctagctggaaggagaagacaaaactcccctctgttcaagataaaacattgtcttttaaagttaatctgtcataacttagggtcaagtgtccaaagacatggaccttgtttaacctttctgtctcagctatacttactgccatgaaattatgctctgtccctcccatatcatttaggctaccaaattgcacttgatgaagggccaccaaagacctggaatggcagtcaaaattggaacattgcaactatttttcatgggtaaagagaaacatttggtcaaacttgagtccagttaccaatgataaaacataccagtgtaacctttaataattgctaaagaacaagacttaagtataaataatactacatctattttatttttagcttatttcatttaaaaattaattcttgctaaacagttctcagtgctagggaaatttgccaaggctcatttctttaaaatggaacataagtcttgctggacatgtatatactgtacttctccagatttctcataagtttaaatatatgggttttatgtctaggtagagaattttaccgtgccttattctataccaggtatatttatatctatatcaatacaggtatattgagaaaatctatgcgtatctacaaactgacaggaggtgctgtgaaggatttttagcttaaatataagcacagattcttgaaagccccacaacaatgtgatattgagtctgtagtaattcagagtgatatgtgtagttcttttctgagtaaaagattttaagtgttttgttgaaaayttttaagtgcgtacaaaagaataaggaggaatctagtctaaattcagcatttttaaaattagctgctaaaaattaaaaaataaaatttttgacatgtctgactacagaatgtatttatttaacaaacaggtgttaagaacagagaaggaggattagacagtatctgtgctttccagaagctcacctatgtggaagagataaatagacagttgtgcatatacaatatcagttgtgctgtggttaggcaccacagcaagggaaacaggtgctttgtaaagggacatttgccttatacaagatcagggactcaggctgggcttccgagaggaagtgacacttacttaagctatgacttctgtgtctcccagttttgtatggtgaagaaattgacacaggagggcctgtgttaccttcagttaactgaaaaaagaatatgcagttgttttgtaacaaatggtccttttgtggcaggatgttttggctgtggacagaaaagaagatgggcccggcgccatggctcacgcctgtaatcccagcactttgggaggccaaggcgggtggatcacaaggtcaggagatcaagaccatcgtggctaayacggtgaaaccccatctctactaaaactacaataaattagccaggtgtggtggcacgtgcctgtaatcccagctactcaggaggctgaggcaggagaatcgcttgaacccgggaggcggaggttgcagtsagctgagatcgcgccactgcactccagcstgagcaacaaagtgagattctgtctcaaaaaaaaaaaaaaaaaaaaaagaaagaaagaaaagaagaagatggtgctbtgtttttctggctctagtttgcttttgtgtgatttctttgttttttaatgctttttactatgaacccatacaaagctacatgatgattatctctgcccggcttagtatctgattttgaacaagatatttttagaagtttagctgatgtgtgtatttcatggggagggtgtgtaaagtagtgcataatccaggctttgttgcagtactgcctgaccatgagcccttctgtgagacctgctcttctacccaaagggctggtatctaagtcaggtttgcccagtgtgaccccccgaaactgaaatattcacaattcattttttgtaggacgctgacagtagaagcctgtggcctaacgtatacagatgtattttaaaaatcaagaaatttcaatgaaaatctggatttctattattacatatccaaagtggagaggcagcatgagttcwctttgttgtaagacccttttcttccagcttctggttttacacctggtcagcatcatacttttaattacctgcctggcccctgtagttgttggaattggtaactccttatgtacagctgtgtctgattaaacccggtgtagacagattttgaccttggttgggttaattagattctttttcccctctgggcattttgaaattgtcttcagggcactacttggtttaaacttaaatcacaagagatacaaatatttggtcatgtcgatgccaaagcagaaaaagcacagctaaaggtagggacaataaagtaaaggttccagaaagaagtagagacacaagaacctgcagcccaagagagagagaatgtttcaacctcggatctgaaaggctgcctacaccctggctctggttcttcataaggcctggctgtacttgctatcctatgtgctgtaggatacctctaattcctcatccagaatccttttacttgaacacttcaggttgggttttgttttttataactaaatggatcttaactaagaggcttacatatgggttttgtgatgtttttgtttcagtagggaaatgtaactttaggtttacaacaatttttcattaatactctatttggattagaacaaaatcttgtaatcattaaatagggtacatgagttgactgttagaaacctttggactattctagttgcatgaggacaaaatcttgacctctgagtttcagtcttccaaaagkagttgtatctattcttgaattgccatattgagattcaactgtgaaaaattgactcagaatcagctaaaaagtttccttccttcttaaccttgatgttttgagaaaagtagtatataacatgttgtatttataaaataatatgcttggagtataataaactaaacacccatgaaccaccatctaccttaagaactgtaacattaccatctactgaagtgtttttgtacctaactcatctcctgcctattgtttccaacagtaaccattatactgaatgaatggatgtactggatgaagtatccattcatgttttccttgcttttcttttatcattttgaaataaatttgtcacatgtatatatgtgtgtgtgtgtatatatatatatatatatatatatatatatatatatgtatatatatgcctaagcagatacattttagtttttaagtattataaaatggttttataatggtttaatctctggaaagaattattgtatgtcagtgcttcctaacttcttccatcatggcatacatagaacttgaaaatattctagaacctcctgatataaatgctctggcttgacacaagactttggctactccaggtactattcaccccagaactaaggggattgggaacacttgtaacccacttactgaggcacactacttggaaagcactgctgtatgtagtcttctccatgtgctatttccacttggatttctgtttctaagatttattcctgtggttgcatgtggccgtagttccttccttttcactgctatataatattcctatgtgaacatataagcattttcatcttctcctgtttagctttcctgcttgcttttcatttacattaagggtcattctagcctaccatgaagtatggaaaactactagatttgacttaacgttttcttaggattcagagatgtgactttaaattttgaatttaaaaacctgtttagttttagattgaatcttggagtatatggtaacaataaatagaattaatttgatcagtaaataagatacaactttctctgtttatgttattaggacaagtctgtttggttgatggtgtttgcctggagtactattggaaaagtattttgagccaagtgagggctctgtggttaagaattcagtaatcagttatggatgtctgccttgggtattcctaatgggagtaaagacatgcttgcttcatatttgccttccctaatctatctgcctccccttctatgatcatcttgaaactatcttgattatctgggtattatccaatttgcagctaacctcttttggaaaatgaaatccatggttagattctgataatttgttattgtctctaactaccttcaccacagttgatgctcttctcacatgtatctaaaacattccatgccttctgtacagcatattttactatcattattgagctccaaactggaaagtaaataaaatgtcctttggtatcctcagtttcagggtttgaactcagctttatgtacatagatcttgtcccctgtaatttaaaataactagagtagcaaagcttctctaaactctccagagcctattaaacattatttttaagataacatctttccttgttcgtcatttatgaatgtttggtcaggaaatggtcgtaaaaagcttcaaatcccaattgaataatgtgttcttaaaagtagctgccaagtgtaaataccactgatatacattcatgcatatgatagtatataaataactggggaaagcatagcaaaggtcaatcaattatgtataggtcagaatgctttccatctggattgagtcattttagcaaatgacatcatgtgtcctttggagtctattttgaaatgtggcttgagtcattatagattggcttcttctctgggttaccrggatggcagtggtgagacttaataaataaatgtactggactctgcaggagcagatttacataattagggtgcagtgatgaaggcttctcattctgcagaaaccctttgggctccattaatttctagttgtttatccttcgtggttgatttttgtttttaaaggaactgaaaacaaaagagtttaaactgagccaaatgctcttcatagaactataatggacatctttccgtgacattgaaagaccagcagggaatcaatagtaatgaatctggcacccttctcgtcttcgtctcttctaacttcatcattgctcttctggatggggctacttggacactttaagtttggtttgtaatttatattttgatctgatgaggagtggtcacaccagattgccagagagaccctagagtcattggcgggttgggatgttgtatgagatgggaagggatgttggcatttttcaattggcacaacaggagctaaatttagctgatagaccacgtgataaaaggagctgccaagtccagtcatttccgattagtcagggcttgaggaggtaaatgttacttgacagaatttaatgtgtgatttttccctcccttcaggatattttggaaatgttaaaaagttgacttttttttttaagtaggatagtttggaatgaaggatttcggtccaaatagctgtcatattttatagacttttatagttggaatccagttcgagccttggaaggaggaaggcttggacattcttagcaaagatgaaaggaaatcgtccttgcgtttagggagcatatagtttagtggaaagacagacatgcaaacagattacsacagtataaaatgacagtcactcaaataagatatgtgtgaatccagacaacatttatatttttggcacttatattatcctttacttgtttgtttgggttacgaataactatggctaaaaaacatgcccccacttgttcttattcttaaggcatattgagagtgaactttcagctttcaagatggatactgtagaggaggcaaaattgtacactcttttagggttttcttttcagctgggcctaagacttaaatgaatataagatagattaatgggagaaargcacacacatttatttaatataagttttatgtgacatgagatacctcataaggaaatgaagactcaaagaagtggcaaaacctagatggttttatattaggttgaacaaagagaggcagttgtggaaaagtaactcaactgtgtggaaaggctaaaggaagataagaattattttaacaagatctgtttgtacagacttttcctagtctcattttcccatccttgatgataagaatgagactttccttctggtatagctggacgtcttctatatgggggttttgtttcctgttttcaggaagaaaaaggggagggttagagaacacttcttgcacctgctgggttttgttttgtattttaatgtgcctttagctccacataatccttaggctaaagtggcatatttcgggctggcatattctcccactcttcactaccctatgttttggccattcagaggcaatgtggctgcccttctcgtggaatagtactgagattctgcatatgatccaaagccctaactccatttcaatgaaactccatggattcctagggactattctttgattgtgactacacagacaccagaacaaacggttaaaagatgaataaataggccaagttgtcactgacttgtcaagttgcctgtggtatccaacagctgattgcactgctatgttttctttccccactatagtggttggccgagattacaatctgtggtcagtggattgatcaactgattcggtgtggtatagatagataaaaagtggaatctcttttttttttttggggggggggtggggaggacggagttttgctcttgtctcccaggctggagtgcaatggcatgatctcagctcaccaacctctgcctcccaggtttaagcaattctcctgcctcagcctcccgagtagctgggattacaggtgcccgccaccatgcccagctaatttttgtatttttagtagagatggggtttcaccatgttaaccaggctggtcttgaactcctgacctcaggtgatccactcgccttggcctcccaaagtgctgggactccaggcatcagccactgcacccagccaaaaagtggaatcctttctgccccactcaaagagacctttccctttatttagggaaaacaatcctgctataactataaatactagttaatgaagaacaaggtctgtctctgatgttttttgacccccatctagatcattctccttaaatactctcaccagagtttttcttacatcttttagccagatattaatgcttaacccatttcccgtttgctccgagagcgttgtgctggtagcaagctgcacttctttcttctaaatggtaagtgggttaagcatatgatagggtgatgaaggtcgttaggtgtcaagagacctgcattccagtcctggcttcaccattaaccagctgagcaatgttaggcagtgtgttttaccctgctaggtttttcctcttcgtttgcttgttacggttccttttggtcatgggctgccttattgtttggatacttggtgccttaagtagcacctgacaccatagtagatcttaagtgttccatgactcraaaaacagtaatactaatagctgtaaacagtttctgttgaagggaatgaaaatattaataatgttaagcagctctaagaattttattattggcatgtcttctttgcctgtgcttttgttccttggatgatttgagactccaactcacagcctctagatttctcttgaagaatacaaaagaccctttttcttgtatccagtatttttttcytatgataaaacagtacatactatggtagaaaatataaaagccacagataagcaaaaaacaaaaacagaatctcctgtgtatcaggaatgtgttcagctgcaaaataaagaaaatccaaccaatagtgactttctccaagtctttagaggataatctagagctgatgttttggcatttctcttctactgttcttagcgtgttatttttttgtcttcatggtcacaatgaagctgctgttcctccagacgttatgtttagattggaaagataaaggataaatacaaaaagagacctgttagataaatccgctccttttaatcagacaagaagaaaagccctacctaggccgggcatggtggctcacgcctgtaatctcagcactttggaaggccgaggcgggtggatcacttgaggtcaggagttcgagaccagcctggccaacatggtgaaaccccatctgtactaaaaataaaaaaaaaaaaattagccaggtgtggtggtgcgtgcctgtaatcccagctacttgggagactgaggcaggagaatcacttgaacccaggaggcggaggttgcaatgagccaagatcgtgccactgcagtccagcctgggcgacagagtcagactccatctccactccagcctgggtgacaaagcaagactccgtctcaaaaaaaaaaaaagaaaaaaaagccctacctagcagccttcttctttaatattttattttatagaacaattcccaagtgcaaggaatgctggagagaagaggttatgaatggaagatggctgaccaatgaatgtttgtcaaaccaatggtatacaaagataacagctctcaataaatatgatattacagtatctactgttttgcaatgtgtttccccccttaatagtaccacaaatctttttttgttattaaatattccaccacttaattttcaatgtctgcatagtgtagtcatgcctcacttaatgaaaactgtgtcattagacaatttcatactcttgtgagcatcactttactgaatactataggcaactgtaacacaaaggtaagtagttgcatatctaaacatagaaaaggtaatgcatgcacaatgactttatgacaactacaacgtcactaagcagtaggaattttttagctccattataatcttatgggatcgatatcatatatgtggtctgtcattgatcaaaacttcattatgtgatgcatgactgtattccactttatggctataccataattaatttgaacagtcttcttttgcttggaaatttaagatttccaagttttactattataaatgatgcagtgatgaacatccctgtagatagctttttttccaaactcttttgaccttttctttcattttaattctgctttttttaaaaaagaaatctgcaaataacaacgacgtaaataaataagcagatatttaggtacccactttaaccagagaccgggaagaggaatttttaataactgataacttacattatatctgcaagatgcaaaatatcttattgattgggcaaagccggagaaacaattagtaaattcagcgacaggatagggaggagggaagtgacccgctttctgattaaatcaatttaatcagtttagttaaaatagattaatgtctttttcaggtctggttaaggggatctagaagtttgcagatatgttcattttcagaatccctcatgcctaaaaatatactttcccttggcgttgtgtttctttttgtacaaaggttgtcaaatgggagtgggaaggtggtacatctcatagctcatctgtcagaaagtattgcaggcatagcaaggttgaaaggctggcatccacgctagctaaaagcagagattgcaaagaagtttggcctccaggagagtaaaaggggaaatgctgtcacatgctcccctcctgccaccattggtgtggtatttggtagggggattactgaccccttccttcgcttgagaatagtgggtcagcaaggcaagaatagggcagagagttccggaacttgctaagaacattacctcttgtaatagggctttaagtgtcaacgctttttctactgtatgctaggagtactaattgagaagctggcccctacgcttcaactatatacaactataagtttttttttttaatgttgcaaagtaaggttaatttttatggggaatattttatgccctgctttctgttatgtgccagacaaattgagggcgatggaaaactgatgggtgatgaagacaaaagagcggtgttgaccttttggtaaatcattcatcatactgcttcatctgtaagtggttttcaggttgcagctcatatttgctaatcactacacttgactctcatttctgcaggggctgattgttttgttgtggattgccttttctcttttaaaaaaattttggttattgttatagctgtttcattactaatacttcctccaccagagggggcttgtgaatagagttgggaattaataattcagtttctgctgctcttcattctccttagtagctgagatggactttaagcaatccattcacctactctgttttgagtcttcttgtccccagtggaattcaattacaagatggctgtctttgacagtggccacagtctggaatagttaactagtgttaatggtctagcaccaggatatttttagttttcatgttgatcaaagtcccattagggaaaactaaaggggaaagcaagaataacttcttagttcaaccctgggtcacatactagaaattatgaaattcattatagtagaagcataaatctgtagggacccaaaatggatccaaggctggcatctggcagaatccaccttaccaacattgtagttacctatgggctgttaggtcctttgngccttctgcctgacttgccagtgcttagagttcagaagcaaggttaayatataagacccccttagggatgaatgggcctgtaagacctgcaggctaggaaggacacctagcacctggtctaagtgaggacamttaaggaaaagattttgcctcaaggatgcagagaaattgactggagaatccaytagggaatctgagcaattatagtgttgtkctgagtaaccctacagagyctttatyttaattatatattttagggtttattaaactaggaactctgtcccctctatgggctaaagagtattttgatattttgattgaaataaaatgggaactagagacactaagaaacagaaactaaccagaaatgctttacttttcctttatttccaatcaaatgcaatgtcaagaaatatctagatgttatctggacttcgcctatcccctgcctgaagttggaattcttctgttgagtaaatagtccttgggtcccagactggcattgttcactaggttggtgggtgcagatggacagttgttgcttgtaactttgcagccaaacttctgaagacatgatcacaagaccattctggatgtctgtgtgtgtggttgggtgggcatgtgggtacaggttatgaccttttcaaaaataattttgttaagccgcaaattgtagacttgtgaatgcaaccaattagaatacttttacttcatttgggataccaaagaacaaatttctttatatttttaatagaaatgcaaacagcaagaaatatgatttccaaatgacaacaaaatcttttaacagggaattttcaaatgttacattttcctttgttagatatagatagccagtctttggagggaagggacacttagatcttagaaaacacgcgatagtcatagtctattaataccagatgcttcttaggagaagaaataattcttacatgatggtgatattttaaatatttgagggttttttttaagggtcttccacaacaatatggtatagaatttagtctgagaggaggctgaaataaattaaaatgaatttttggaatcctgcttattggaaatgctgatgctattgtgctattagatgctcctcacctcttcctgctacaaatgtacaaacttccctagactcatacctgcccttgcccttttcctcaagactcagagattaagaagaattttgtcttctgaatgcttccttcaccttttactgttctgccccatccaatttgttagccagtagccacatctgactgtttacatttaaattcgttcaaatcaaagtaaaaaattcacatcctcagacacactggcctcgtttcaagggctaagaagtacatgtgcctattgtctatcttataggatggcgtagatatcaacattgccatcatcacagaaagttcttttggatagctgcttgatactcttggcaaactcttaaggaggcttccccatcaccctctccaggggtgtctgtttttttctcagtgtctgacagtggagttggtgtcttctggtattgttcattgtcacttctagacagttccttttctcttcctccgcagaggcttttaaagcacatgccataaaactcttctacagcctactcctctgtatttattgaagacgttccccccagcgccctgtctttatactcatcattctcagtaaaaacatccacagagaatactcatacctggtctatcaggtccctgagtttctcacttgcaaatatctctccctacctcatagtcataccccaggccaatggttcacaatctaggaagtaccactctcctagggagtaattgcaaatgtaaggagtgctactggtatttagagggcagaagttaaggatgctaaatgtcattcagtacatgagactgttatgcacgatgaagaattgttttccccaaatgccaatartgcccttgttatgaaatgccatgctaaccttcaaagtatgtttcacagcrtcccactctctgaccaccacttcctatcttttcagggctgctgcctcaggtgacattagcatctctactccaacagttctttgatcctgtggggcctccaatctgttgacttacaggatttatgtacaatccgtcatcctcctgtatcctcactttcctccttgctcagctcagatgctatggttcwtctcttctttacatgcacactgaactcctttgctcatctttctctgtcattcttatctggcaaaactatgaccctcattcagctttccacctactttgggcctgagtgtggatggatggaggacacacaactatgctgactgcagtggatcctctgttctacacggtgatcctgcattgtttacctaatacttctactttctgagaaaactattttatatcttcayctgtacctcaactctccaatggccatccccakctctcycaatcagttgattgtctcacttcttatttcactggagaaagagaaacaatcagaagaaactaccttattttctctagcaaatctacaagcctacctgtatccatccccacagtccccatctccctttctggtattctgcatgaactgtataaaccctgtaatagggaggctgaggcgggtggatcacttgatgtcaggagtttgagaccagcttggccaacatggcaaaaccctgcctctactaaatatacaaaaaataagcrgggcatggtgatggatgcctgtaatcccagctactcaggtggctgaggctggagaatcactcgaacccaggaggcagaggttgcagtgagccaagattgcaccactgcactccagtgtgggtgacagagcgagactctgtatcaaagcaaaacaaaaaacctgtagtaactccccatcatccttagaattaaattcaggctttttgctatgacctcaaggctcttcaagattcagccctcttctttttacctagtctcataccactctcctttctccctgcagtctgttgacattggttttcttgctgttcttctcaacatctttgtatttgctcttgcttttgtttggaaatcttctccccgagatatttgtatgcctttgcctcctgttgcacttaggtgtctgctcaaatgtcatcttctcagagaatcctcccttgatcatcttgcctactgtagctttcctcctccctcatcatcctccatctctttgccctgcttcgttttccttcacaagacttacgactccctgatgttgtattataaattcatgttcatctttttattgtcagaatataacttccgtgacactggagagttgactatcttatgacttctgtatccttagtgcctagaacagtgtttaacactcactgtttrttgatgaagtatttaacatatatttgataaattaatgtttcatcaataaagtgtgctgactactatggcaaagactcttaatttggcatgcctctactactcagagccacatgatgactcaattttctcaccacttttctctatttgaaaaattgggaaacttccttttgcactgtcccataatatcatttggctttcatttgatataaacgcatcatttacatgttaattctgcctttgttcttttctcattagcccataacaattaaaatagaccattactctgccacactatgagtttttatgatgtcatatcaaagtctccattaattaaataacttaataaattaaagtcttattccatgacactatctttccattgcaaattatcttcaagaagagcacaatagcagacatgggacaattttagcattaggacatgccaacctagcagccagatgtgctcactgacacactgaaagttaaaagctgtcatttaaagtgattgtttggttccagtgatactgagaacagaacagagttgatggaggaaaaaaaaaagacaaactcagrcactgcttttggaaagcatagctcaattatcaggttgtcatttagattcttcaggacattaattggaataaaaccataaaaacctaaagcatattctcatagaatgtttggagctatgatactgtgcctttgggttcagtttgagaaacactgagctgtagggtaaagttcaaatttcttaacttatactatgcgaccctcatttaactggaggaaacattggattgttaggtggtaggatgaaggcagggagagaaaagatactaattcaattgtcaaggtaacaggtgagagactgggatagggaagaagaaaggtagaagagacagaatgagagctgttccygatagaaatttttaaaaatgaggaggttgaagaggaaagtacagcaacattggaggtagatgacaagtggattcacttattttcatgttataggtaaagaaataagagtagtagtggattagccatcttagttggggattttctgtgttatatatataagtacttatgagcttgaagctttaagagaatattatttgccaatgtgtctaaattatttattgagaacagctaaattatgagtgtaagatagatacagcaatgcttgctatggtatgcagtacttggttcagtgagaggccataattactgacttttaggaagctgtagattaattagttgaaatgaggccaaataatcagtaatcaaagccaatatacaaatgattaaacctatctgtctgcaggcaaagattcttaagttggatagagagaacagctatactctctttaactgtttacaaggaacaacccaattaaggataatagcatgggaagattaagagaaaatagatgaaattgacataatacatcatataaatatcattcaaatgaaagctggtgacactattaatatcggacaaaatatactttaaaagcaaaaatattattacagataaagagttattatttaatgataaaagaacaattcaccaggaagagttaatcctgagcctacattacctagtagcatccttttaaaaatatagaaagtaaaaattgacacagtcrccaagaagtattgaaaacccatataatcataatctgagagttttaaccatttttctctcagacactgataaatcaaacaagctaagaagcttagaaaagataaagaatatttaaaccacataaccggttagcttggacaaatagacatatatagaacttcaaactccactaacagataatatacacacatagaaagtcttaatgctgatgaataaaaattatatttactaattctttatttcagaggaaaaaagcaggagattagaaactgatacttttcaaaactttatacatttggaaactcaaaactgtacctgtcaataatttgtgagtcaaagaaaaatgatgatagaaattagtacatactttaagtcttgtgggacacaaagaggtatatagagggaaatttatagactyataaatgtatacgttagaaacggaaggagacattgttagggaattaaggattcaattaaaaaggtataaataaaatagcagagtaaacccaaatacagtagagggaaggaataatacaaaaatattaccaaaaatgaaatagaatacaaagaaacagtagagaagatcaaccgagcaaaaaatgattattttaaagactaaaacagcacattctcacttgtcaaacttgatcaactacaaagagagaagaacaaagagagagagagagagagaaatacaaacagtattagaaatgaaaaatgggagctaaatatagagacaattgaaaatagaaggtcaaaagaatataccatgaataacttctttatggccatactcttgaaaatataccttctaattaacagggataccctatgtatatatatcyatgatwtacacattgtaagctagtgtcatgactagagattgagaaacataatgaccaggttaagtctggcttctgagaatgaaaattcattcattcactcaattaatatttgtggatacctactgtatacttttaattatgctggtgctaacatatttttatgaatgagagagacattaaacaaatcagtaaaaaaaataactacttcagcctggccaacatggtgaaaccttgtctctactaaaaaatacaaaaattagccaggcatggcggtgggcacctataatccagctactcgggaggctgaggcaggagaattgcctgaacccaggaggtggaggttgcagcgagccaattgtgccattgtaccagcctgggcgacagtgcaagactccatctcaaaaacaacaacaacaacagaaactatttacaattttggtaagtgcagtataggaaaagtgagagtgtttgacagggaacctaattttaccagggcaaagggcagatcaacaaaggttacttgaagaagtgatatttaagctttgatctcaatgggtagaaattatccaggctagaaggtggaacagagtctaaatacagagcagaaagaaaatgatatatcaaagcagtgtggtatgaaggacgaataggggatcagagggtgcaaacgtagaaaggtgtgtgattcggtttcagtggttgccatggaatatggtcaggatttgtatgagctaaacgcattaaattcatatatctcagcaatgtgcaaacaaattttctctttgctttatttaaatcctaagaacatagtcagtagaaaaagtataaaaacatggataggaaagaaagaaaccaatatcattcagaatagtgattgcttctagagaagggagagcagaggggacctccgtatccatcccttataaatgcaaattcctttcctgaaaggatgtataaagttagctgcaatcatgagtttgttaatttctttgttaagtgttggacttatctggaatggagccctcaatttaaaacacagagtagaaaattatagaagagaaatgaaggtgccatttttaagggagcagtagtttagacagtactactcaaagtgttgtatgtggaccagttcatgaagagggaggtgcagagtttgggagtaatggtttaaaatggcactttcccacacaacagccactagctacatgtgactgttgagtacttgaaatgtggccagtctgaatggggacatgctgtaagtggaatatacatgctggattttgatgacttaatttttttaaaaagttaaatatctccattatatttgtatactgattacatattgaaataaggttgtggatctattggactacataaaatattattaaaattaatttcaactgtttctttttacatttttaatgtggctactagaaagcttaaaatcagacatgtggctcctatgatatttctgttggacagtgctggtttagagactgtcatagcagtttgacactaccactaaatccaagtgcaatttttattgtattttataaaagtatcrccaacccacaacatattggagtgaaaaatatagtcaactagttttacatcctaaatagtttgtgaagcactgctttaaaccattcataacttccagagcattttaaccactatgcttattataggaaaatatgtatactgtaaggtcaatttttcagaacactatgaaatattctaagaacctgactattaaattgatttggctctctgtgtatgaaaaaagtgattgataaagatgtcatcatataaccctcagacattatcatataaccctcattgtatttattttcagttacataacttgtatattggattcggaaagaatataataaaaactatagtacagaacccatttttaaaaaatccagttggaggaccagtttgatatccactagttcttattttgagaattaaaaaacttggggtacagaagctcatatctcagattaattacattgcagctttgaaaatacacttaagtaattgtcttctttagattttgttctataaaattgacttatttttcttcagaataggctagttaacattggacttagagtttggcacacgtgagcttgtgatttacagggcaatttttctcatcaaaacctgggcagaaccatttattttaaaaccaatatttattttacaatgggaagatggagcagattaaaggagcataaaactatgataaatcacccagtctttatcccgtagaaattcttttaaatggctctttaagtaatagcagtaaaaccgtttcatagagtttgtttggatggttttttagcatatggtatagtcatgtagattaaaatctaattaatraagcctttataataattcagacatggtctgtgtgattccttttcaataaaaagtacaatatgatttttcttagctacgtttctgagtcttgatcatgattaaaaatggaaaccagtctaaaattcttagctgtttcaaatcaaagacccagaagttaaatttcttttaatgtttctaaaattaattattaaatagtaaccaatttttacatgaaatatttaagaacatgtatatctatgtgtattatagattattatgcaattgttgaagaaaggaatttttacaacttattttgttttatttggttcgcatttatgtcttcggttataataatttctgtagtaaaaataatggagctacatttttctaatagtattctttaatactattctaatgatagtgaagttatatcacatagagcatttggaccaattaaaaatactaatgggaataaaatattttaaatgcagatctgcttgtagtcacrgtgaattttttaaaaataggaagtctgtgtcctattgttgaatggatgtctggattctgtatctagttaattatggattctaggtcagggttggcaacctttttctgtaaaggactaaagggtaaatattgcaggttttttggtagtatggtcacaactactcaactctgctgttaatgatgagagcaaccttagacagtatatgcatgaatgggtgtgtgtgcaaatcctttaaccaagcacttctatgtctgtgaatattccctaaggaaataatgagaagttttggtaaacaagtgcgtgcaagagaatcaattatggtattaccgagtaacatggaaaactgtatatgagccctagttaattcaaagaaaagcaacaaagtagaagttaaggtgtcatttgactttaatgtaatgtgcgtatgtatatgagattggaccatgtagaattgcacctaattgactgctttttatctgcaaaatgataattttatatggacaacctaagatgtatacatagaaacagactgaaagattatccacctatagttttctgggcggaagaaatagaataacttttacccttttccgtatgttcattatttacaatgaacatattttaacctgcaatgagaaaaatgatgcagggtttttagaacgaaagaaaggctttcccattcaaattatgtttctcaatgataaaaatacacaaagaatacacatgtagctctctttggaggggacgggacctcctgtgagaaacttggagaattgtttttctattggcaaggccatttctgttacggcaatggatgtagagagctgcagccaagggacattgggtattctttcccattggtgactccatctcccctgacgctgtttaacattcagttcatcagatgaactcctcttgttcagattccttacatgtcagattgctgcctgattaggatttggttttgcagggaagacatttacaggaagggaatgaatgtattggtctttstgacatctgtgcaacagctatactgcaaatcgtagactactactttgacattctggttttatatgttggtctcatgagtgtgtttaatgaagtccatctcatgagaaatggattccatactgtgtgttgagaaaaccaaggccaagggggctgaagcctggtataggggaccatgtaaagtgtggatgactttcagctgggcttctggggagaaagcctgctgcccttcctcatacrgcattctacatagcacaacacagtaggaagcttaagtcttttcctatttggactctgcccctttccaactctcaagttctgcaattctttgacttttctgtcttcagcccttgcttcctctgcttttctcactgcttttgtcacctagcagaaacagtggtgagagactgctacacaagagacattgtttgctgctggtatttaactttctcctggagttttctgtggatgacattgatttatggtgcaaagggccctctgctttggagctgacctgtagagaaacagagtccctcaggccttctgtgaggctgggacccccttgttccagcgacagggattggtatttatgtgagactgtgggatatccccctagagccagctgattcctgcagtgacaatgtgaagaaaagtagcagagggccgggcgtggtggctcacccctgtaatcccagcactttgggaggctaaggcaggcggatcacaaggtcaggagttgaagaccagcctgaacaatgtggtgaaaccccatctctactaaaaatacaaaaatkagctgggcatgatggcgtgcacctgtaatcccagctactcaggaggstgaggcaggagaattgcttgaacctaggaggtggaggttgcagtgagcggagacctcaccattgcactccagcctgggtgacagrgtgagactccatctcaaaaaaaaaaaaaaaagaraagaaaagaaaaaagaaaaaaaaaaagcagtagaccacttctgcacctgagagaggcagacattytgtgagctcacatatttttctcatcagactctgaaacagcatttcactgtattttgatacaaatgttcaaactacacattaggggtaatttctgcctcatttggagcacgaatctaaatgattgtatctccattagagaaaatgaagagccctctgtgtctgatactacttcgttaaagagaaaatattctcctagtaggcaaaagttactgaccaaatacagccccaaatcaaagatcattcctactaagaactcttacattagcttcctttttcatgaattaaygtgggtctgtggaatctacatttctttgaaatatttgcacattttcccttttcagcagatgagagaaaatcttcattgaagacacattcctttgtcactytgggggctgataggggatgagagtctttgtatttcaagacatctaacctgcttacagaatttgaggttatacatcttgagtaagctttaggtctgaaaattgagacttcagctcacaaagtgttgattacatccctttgcttagcaatacagtttagtcatttgtaaaaagtcaactgaatacaatttggcctcatcaatgaaatgtatcaagaaccataaagtwgtagaatgatgttaagaaaaataacctttcctttttttctttgctttctttgtattaaaaaatgaaaattatcctcttttccctttgagttcatgctaccaaagtttacagattttattttcaatgtttaaatgtttatgcaaggggagttcaatttacaaatctaaatgctaccaacacaacagttaattttagaaaattgtcagtcaccagacacactagctctagaagaagaggattcattttctacataggcaataatgtatgttataaaaaatcaaaagatagtcacatggaaaggggaaaaatgaatgtagatcaataatttaactctgacctaagttctataacatggctcataatttttcaatgaatagacccttaacattttacatatagagcttcagttttgtattgatctgccctaatgtattcgtcatttcacagaaggaatagcatatctcaaatctttaacaaacacacattgtgtcggcctgcaaatgttagccaaaatatgacaacatgttgttatttactctgttttcagaactactttttttctggctaaataattttttaaaattggaagagaaatggatagtaaatgaatgatgacttggagggcaagttcatggagctctttcttagttaatagattcctagtctttctgcattacttaattgcgtattaaaagtggaacccttgatgtaccatgtacagcatatatttattctgtagaaaattattaatttttaatggactaagtggctgtttggacaagggaccctgactattaatcaggaggtgagtgattgactgactttcatgttcattaattattcaaggaagttcacytacaagggccacaacagaaaaaagtttctgtcagtatgcacattttagtaccatattcatttactcacttaacaaatatttaatatgtgccacgcattgatgattcagtgatgagcaagaccatcagcctctgtcctcaggaagctgtcagggcagtgcataaagcagaagtgtgtccatgtgcgaagagaaggagaatgctaccgagcagtttagaagactcagttttgcttgactcccctctctatttaggaagtgattattctctgtacatatttcctaagtctyctggaaattcaacctagccaattctaattcttatctgagaaaatattttgtttggaatgatagggtcacagtttcttagagtcagaagagacttgagaagttatcgacggatgcacccttgtcttccctgcctcagccgggacacatccaatgcccagaagagagcaggctcatgtgtggggccatttctgtgtggattgtttgaaactttttccaaataatgaactgcagcttatttccctgcgtattctctttaatgattccagtcctgtatcctggataaaataataayatctcatttacctcttatttggaacacatgtcataattgtccatttatttgtgtgatttttgtatcattactctgttttcccttttaaacatgtgtacctcgagagtggaattgtgtctgtttttggtcattgttatttctctagtgttatcacagtgctagggaatgaataaatgaatggatgagaatgatttatcttgttccaaaaggttttaaggaagaatacatggatttaaacctacataatagttaattaactatttgacaataactgtaatggttctttcactactccaatttttctgacactcagattaagatttttttgtaaattttcttcacatgtaatattgagttcagcttttatggtgtccatctgtctctcaatgcatctcacatatttttttaaagtgcctctctcactaggaggtttggggaaggcttcacagaagaggtgaaaattggccttgtgctggatcttgaagaatgagaaagcattctccatgaaaatggagccaggaggggcactttccggggtgcagtgttatgaacatgtttactcatctggcatttkttacctcrgccctttgtgcttccctattctttggagatttttgactcattttttcccatcttcttcaggaacttgactattctttcccctttcccacttcaacattgcctcaaagctggaggcagagattcttgtgatttagaatttgcattagggcattagacagtctgggttcaacccatttgttacatgtacttaagcaaggtaggatactcctttgagatttagcattctcctctttaaaatggagaaaataatagctacctcataaagtacttttgagaattatcatatacgttacatgtgatgtgcttgagacacagtagagacctaacacactgtaactgtcatccttgcctgcactctagaaagccactgctgtagctcactctggtggtataaccatctstccagcggcctcaggrcatgcagtggctcagacatattttttcatggaaacctcatcaatggctaatagatgtaaagctatttcagctttttccaggtccttagtttagtggttttatatttctgyccttgttctttccaatttccaggtgcatgggatccagttattttttcttttctttttttcttttttttgatagggctgtacaggaatcagaattgacacattcgcccatgaatttccctcttttcaggtctccatttctcctggtactgcaaaagcctagatttctctgatctcacctctcccagcctcatctgggtaaccaacgtacttatttcattctggtcaagattcctctcaataggtttattgcagattgctgcagctgcaatcagtgtttacaatctgatgacaagttggagattaaggcttgtcatcactatttaattaacctcaaattaagcagtttctggccccattccatgcccttccacaagccattcagagctgctaaaacagtggtgtgaggcctgatagattccgggtcacaccactggagagtgggagctggctcagcagccactctgaagaaaatcaacatttgattcttactcttatgcctgagggctgaagataggtagctatccaaagaaaatgtaaagggaggggaagaaaggagggcacctttctatactagtaagtgtgtagtctgtgaattgcaaaggacatgagccaaaaagtgttccagagacagaagaaaaaagccttgctcttagtgtttaaaaataatttgtttttctaattgcagaggtgacatgcatcartagtaaatggtaatggtaaaaaaggagaaaaataataagaaagtgaagaacattcaacttcctactctacacacccgcttttgaggcttacctgagctgtccaatctggtagtcactatcctcatgtggctcttgagcttttaaaatgtagcaagactgagttgacatgtgctctgagtgtcaactacacaccggagttctaagacttcatatgcaaaagaagaattcaatatatcacattattaatttctgttgcttacatgattaaatrttattttgcatatgtkggactaaaatatatcactaaatgaatttcactggtttcttttaactttttaaaaygtaactactgacactaamattacttatgtgccttgtactgtatttctattggatggtctcttttggaccattttctccycatgtatacaaaatttttacaaagaaaaactgagttattctacacacaactttgtatcttcccttttgaagttaatatattgagaatatgttcatgtcatgaaatataagttatggtattatttttaatcatttataatttttcattttatgaatgtcccttcattgattaatcaagtcctcttagataactaccattttttaaaaaattacaaattctccacgagcatacttataactgtatctttgggttcatcttcaattatgctcctagggtttgtttctggragccagtttgctgagtcacagacttgcttgtggtgtgactggctacaagggaagggtgagtggttggttgtgggtagatgaaagggaagctagagagraggaggtaccaactgctaggggctaccctcctttctccagcagaaagtggatgacaccaaaactgagaggttggaagagagtttaatgaacagaagattgacagaggtgtgggtagatttaagggaaccaaaaaagatggtgaagcaactatggaaagtctgaaggagcaaagacagagaacagaattacaagaatccaatgagagccctagctaggaactagggaaaaagggccactgacagaaattatagtcaaagctagaaaaatgtgggcacttgtcaaaagtctcagttgtgcagtgtgaggggaggagagaggaaatggggaatagatacccccagactctttcctccaattctctgatcccttaatgctgcctgccattgtcttagccctatagaaaccaaagggcacgggagatgagtctgtagagatcagtaaggaagagaccaccagcagsgcagagaagggtggagaagagataggaagaggtgggtggagaagagataggaagaggtgagtggaggaaaatcagaacaccagcttggatacttaaactgtaggataaggcacttatcctgtgtgagctttgctttcctgacctgtaaaatgtgcatagtaatacctacctcagaatgtgatcgtgagaataaatgaaggagagcacttagcacaayggttttttatttacttgttcttcatcagaggcttatcagtggaccatatcaacttcttaccatgttgtccatttatcatgtctaacaagttcatcaagagggaaagtagcagaaaaacttaccctggcagactgggaccttatatttagacttgaaaagttctctacaccctagtgaggtagccgttagtgttctgaattgtgcatatcacacccttgtgctctggtaaaaatccacagaatttttcacatagttggataattaggacacatgctgttggctctgctcaaaaatggtcatttaagtgtccttttattatttctagcatccactgggaaatttaaatagctactgccggtgttctttatatatgctctttaaaaaatgctgaaattgaacagtttaataaaattgctggactgtcagcttcaccaagctctcccagagataaacctgaaaaaacaaactccataccctaaagtaaatacttctgtaaatcagggacttttacaggtgctccctggggagtgtagtttgactaatatggagtttcgtttacaaacaggggtggaagccggaagcttctgaggcgatttgaccgcttcattttcctttgcttaacacagatctgtactaaaaacaggcggcagcatttggaattaggggcctccgaaatgtcatctctctaattcttaagtagaaaaatgagttgcacatagtgtaaaataaatgaatatattttaaatacatgaatacgtaaatatgtgaatatgttttatttttattatttttttaaattatactgtaagttttagggtacatgtgcacaacgtgcaggtttgttacatatgtatacatgtgccatgttggtgtgctgcacccattaactcatcatttagcattaggtatatctcctaacgctatccctccccactccccccaccccacaacaggccccggtgtttgatgttccccttcctgtgtccatgtgttctcattgttcaattcccagctatgagtgacaacatgcagtgtttggttttttctccttgcgatagtttgctgagaatgatggtttccagcttcatccatgtccctacaaaggacatgaactcatcaatttttatggctgcatagtattccatggtgtatatgtgccacattttcttaatccagtctatcattgttggacatttgggtcggttccaagtctttgctattgtaaatagtgccgcaataaacacacgtgtgcatgtgtctttatagcagcatgattcataatctttgggtatatacccagtaatgggatggctgggtcaaatggtatttctagttctagatccttgaggaatcaccacactgacttccacaatggttgaactagtttacagtcccaccaacagtgtaaaagtgttcctatttctccacatcctctccagcacctgttgtttcctgactttttaatgatcgccattctaactggtgtgagatggtatctcattgtggttttgatttgcatgtctctgatggccagtgatgatsagcattttttcatgtgtcttttggcttcataaatgtcttcctttgagaagtgtctgttcatatccttcacccactttttgatggggttgtttrttttttcttgtaaatctgtttgattctttgtagattctggatattagtcctttgtcagatgagtagattgcaaaaattttctcccattctgtaggttgcctgttcactctgatggtagtttcttttgctgtgcaaaagctctttattttaattagatcccatttgtcaattttgtcttttgttaccattgcttttggtgttttagacatgaagtccttgcccatgcctatgtcctaaatggtattgcctaggttttcttctagggtttttatggttttaggtctaacatttaagtctttaatccatcttgaattaatttttgtataaggtataaggaagggatccagtttcagctttctacatatggctagccaggtttccccagcaccatttattaaatagggaatcctttccccactgcttgtttttctcaggtttgtcaaagatcagatagttgtagatatgcggcattatttctgagggctctgttctgttccattggtcaatatctctgttttggtaccagtaccatgctgttttgattactgtagccttgtgtagtatagtttgaagtcaggtrgcatgatgcctccagctttgttcttttggcttaggattgacttggcaatgcaggctcttttttggttccatgtgaactttaaggtagttttttccaattctgtgaaggaagtcattggtagcttgatggggatggcgttgaatctataaattgccttgggcagtatggccattttcacaatattgattcttcctacccatgagcatggaatgttcttccatttgtttgtatcgtcttttatttcattaagtagtggtttgtagttctccttgaagaggtccttcacatcccttgtaagttggattcctaggtattttattctctttgaagcaattgtgaatgggagttcactcatgatttggctctctgtttgtcttttattggtatataagaatgcttgtgatttttgcacattgattttgtatcctgagactttgctgaagttgcctatcagcttaaggagattttgggctgagaygatggggttttctagatacacaatcatgtcatctgcgaacagggacaattggatttcctcttttcctaattgaatgccctttacttccttctcctgcctaattgccctggccataacttccaacactatgttgaataggagtggtgagagagggcatccctgtcttgtgccagttttcaaagggagtgcttccagtttttgcccattcagtatgatattggctgtgggtttgtcatagatagctcttattattttgagatatgtcccatcaatacctcatttattgagagtttttagcatgaagggttgaattttgtcaaaggtcttttctgcatctattgagataatcatgtggttttgtcgttggttctgtttatatgttggattacgtttattgatttgcgtatgttgaaccagccttgcatcccaggaatgaagccaacttgatcatggtggataagctttttgatgtgctgctggattcggtttgccagtattttattgaggatttctgcatcgatgttcatcagggatattggtctaaaattgtctttttttgttgtgtctctgccaggctttggtatcaggatgatgctggcctcataaaatgagttagggaggattccctctttttctattgattggaatagtttcagaaggaatggtaccagctcctccttgcacttctggtagaattcggctgtgaatccatctggtcctggatttttttggttggtaagctattaattgttgcctcaatttcagagcctgttattggtctattcagagattcaacttcttcctggtttagtcttgggagggtgtatgtgtcgaggaatttatccatttcttctagattttcttttttttttttagcatttaaaaataggatttatttatttatttatttatttagagacagagtctccatctgtcacctaggctggagtgcagtagcacaatcatggcttgctgcagcctctgcctcccaggctcaagtgatcttctagcctcagcctcctgagtagctgggaccccaaggcatactccaccatgcctggctaattttcgcactttttttttcttttttttttttaaagttctttcatacactttatttgaacttttcttttttttttttttaatttttttagtatttgttgatcattcttgggtgtttctcagagagggggatttcgcagggtcataggacaatagtggagagaaggtcagcagataaacatgtgaacaaaggtctctggttttcctaggcagaggaccctgtggccttctgcagtgtttgtgtccctgggtacttgagattagggagtggtgatgactcttaacgagcatactgccttcaagcatctgtttaataaagcacatcttgcacttcccttaatccatttaaccctgagttgacacagcacatgtttcagagagcactgggttgggagtaatgttatagattaacagcatcccaaggcagaagaatttttcttagtacaaaacgaaatggagtctcctatgtctacttctttctacacagacacagtaacaatctgatctctctttcttttccccacatttcccccttttctattcagcaaaaccgccatcatcgtcatggcctgttctcaatgagctggtgggtacacctcccagatggattggcggccgggcagaggggctcctcacctcccaggcggggcrgctgccgggtgggggcacgcccacctcacagacggggcggctgccgggcgggggtgctccccacctcccagacggggtggcggccaggcagagacactcctcacctcccagacagggcggccgggcagaggcgctcctcacatcccagacggggyggccgggcagaggcgctccccacatcccagatgatgggcggccaggcagagacgctcctcacttcctacacggggtgaaggccaggaagaggtgctcctcacttcccagactgggtggccaggcagaggggctcctcacatcccagatgattggcggctgggcagagatgctcctcacttcctagacagggtggcggcggggcagaggctgcaatctcagcactttgggaggccaaggcaggcggctgggaggtggaggttcacgccactgcactccagcctgggcaacattgagcactgagtgagcgagactctgtctgcaatcccggcacctcgggaggccgaggygggcagatcactggaggtcaggagctggagaccagcccggccaacacggcgaaaccccgtctccaccaaaaaatacaaaaaccagtcaggcttagcagcgcacgcctgcaatcccaggcactcggcaggctgaggcaggagaatcaggcagggaggttgcagtgagccgagatcgtggcagtacagtccagcctcggcaacagagggagaccgtggaaagtgggagacggagacgagggaggggggcaccgtggaaagcgggagacggagatgaaagggagagggagagggagctagattttgtagtttatttgcatagaggtgtttwtagtattctgtgatggtagtttgtatttctgtgggatcagtggtgatatcccctttatcattttttattgcgtctatttgattcttctctctcttcttctttattagtcttgctagcagtctatcaattttgttgatcttttcaaaaaaccagctcctggattcattgattttttgaagggttttttgtgtctctatctccttcagttctgctctgatgttagttattgcttgccttctgctagcttttgaatgtttgctcttgcttctctagttcttttaattgtgatgttagagtgtcaattttagatctttcctgatttctcttgtgggcatttagtgctataaatttccctctacacactgctttgaatgtgtcccacagattctggtatgttgtgtctttgttctcattggtttcaaagaacgtctttatttctgtcttcatttcgcgacgtacccagtagtcattcaggagcaggttgttcagtttccatgtagttgtgtggtttcgagtgagtttcttaatcctgagttctagtttgattgcactgtgatctgagagatagtttgttataatttctgttattttacatttgctgaggagtgctttacttccaactatgtagtcaattttggaataggtgtggtgtggtgctgaaaagaatgtatattctgttgatttggggtggagagttctgtagatgtctgttaggtccacttggtgcagagctgagttcaattcctggatatccttgttaactttctgtctcgttgatctgtctaatgttgacagtgggttgttaaagtctcccattattattgtgtgggagtctaagtctctttgtaggtctctaaggacttgctttatgaatctgggtgctcctgtattgggtgcatatatatttagggtagttagcttttcttgttgaattgatccctttaccattatgtaatggccttctttgtctcttttgatctttgttggtttaaagtctgtttatcagagactaggattgcaacccctgctttttttgttttccatttgcttggtagatcttcttccatccatttattttgagcctatgtgtgtctctgcatgtgagatgggtctgaatacagcacactgatgggtcttgactctttatccaatttgccagtctgtgtcttttaattggagcatttagcccatttacatttaaggttaatattgttatgtgtgaatttgatcctgtcattatgatgttagctggttattttgctcrttagttgatgcagtttcttcctagcctcgatgggctttacaatttggtatatttctgcagtggctggtaccagttgttcctttccatgtttagtgcttccttcaggagctcttgtaaggcaggcctggtggtgacaaaatctctcagcatttgcttgtctgttaagtattttatttctccttcacttatgaagcttagtttggctagatatgaaattctgggttgaaaattcttttctttaagaatgttgaatattggcctccactctcttctggcttctagggtttctgctgagagatctgctgttagtctgaatgggcttccctttgtgggtaacccgacctttctctctggctgccattaacattttttccttcatttcaactttgttgaatctgacaattatgtgtcttggagttgctcttctcgaggagtatctttgtggtgttctctgtatttcctgaatttgaatgttggccgtccttgctagattggggaagttctcctggataatatcttgcagagtgttttgcaagttggttccattctccctgtcactttcaggtacatcagtcagatgtagatttggtcttttcacatagtcccatatttcttgtaggctttgttcatttctttttattcttttttctctaaacttcccttcttgcttcatttcattcatttgatcttccatcactgataccctttcttccagttgatcgaatcggctactgagacttgtgtattcgtcacgtagttctggtgccgtggttttcagctccatcaggtcctttaaggacttctctgcattggttattctagttagccattcgtctaatttttttttcaaggttttttacttctttgccatgggttcaaacttcctcctttaggtcggagtagtttgatcgtctgaagccttcttctctcaactcgtcaaagtcattctccgtccagctttgttccgttgcttgtgaggagctgcgttcctttcgaggaggagaggcgctctgatttttagagtttccagtttttctgctctgttttttccccatctttgtggttttatctacctttggtctttgatgatggtgacgtacagatggggttttggtgtggatgtcctttctgtttgttagttttccttctaacagtcaggactctcagctgcaggtctgttagagtttgctgcaggcccactctagaccctgtttgcctgtgtttcaccagcagaggctgcagaacagcggatattggtgaacagcaaatgttcctgactgattgttcctctggaagttttgtctcagaagagtacccggccgtgtgaggtgtcagtctgcccctactggggggtgcctgccagttaggctactcgggggtcagggacccacttgaggaggcattttgtccgttcttagatctcaagctgcatgctgggagaatcactactctcttcaaagctgtcagacagggacatttaagtctgcagaggtttttgctgccttttgtttgtctatgccctgcccccagaggtggagtctacagaggcaggcaggcctccttgagctgtggtgggctccaccgagttcgagcttccaggccgctttgtttacctactcaagcctcggcaatggcaggggcccctccccaagcctcgctgccgccttacaytttgatctcaggctgctttcctagcaatgagggaggctccatgggcgtaggaccctcctagccaggtgcaggatataatctcctgatgtgccgtttgctaagaccattggaaaagcacagtattagggtgggagtgacccgattttccaggtgccgtctgtcacccctttctttgactaggaaagggaattctctgaccccttgtgctkctcgggtgagatgatgccttgccctgctttggctcatgctcagtgtgctgcacccactatcctgcacccactgtccgacactccycagtgagatgaacctggtacctcagttggaaatgcagaaatcacccgtcttctgcattgcttactctgggagctgtagactggagctgttcctattcggccatcttggctccacctcgtgaatatgttttaaatacataattaccagactcttttaggaagtataattattgaatgaataaggtatcaattaggaggaccagcttgcatttacttaatctttacaaggttctggtcactatttaaaatgctttgtgtacattatctcatttcatcctcacagtagccctgtgaatgaatagtgttttcttcatattacctacagggaaatggaggctctgagaaatgaagaaaaatggttatggcagtgtcatgtttagcaagtagcagaggcagggatgaaacacacacaacatttgactccagagtctgaacccttaaccaccattctatgtcatttcttccctaaacgtttgtggagaaacttgagaaattttgtaaaaaaatgacaacttaggtaaacccatgtgggataattaggcacagtttttattcccataaaccacttgcagattgtagacatgttccttggtttcttactaaaaagcaccatctaagtgaatcccaatattaaatctaccacactagttgagctgagctaaaggagttttatggccaatgaagcaagatgtttactgcgtatttgcttaacattaatgattttttatttttaatgatcaagtgttattcaaagtttaacttatactagttataccacatgctgaaaggcatctctaattgtacatgtattgactgtgagaggatgcaaagtaggattccacaattttaattaactgttcctcctctgacatttcattactggttctggaagtggtagtagatggcagacagttaactgtmagaatttttctttaaagaaggtaagatggagaaatgttagtgttgtcttggtgattggagaggaaagcagggaagggagagaaatggctgatagcttaacatgttgataacatggttgagtaaacaaggcttccagcatttgtaggtaaattttaaaaatttgagcagatagacaaaaatggaaataaaaaataaagaaatcactaacttcaacttttgcaacttttatattgcaaaggcaatttctttctcctgaaggtgggtacctcctagacatcatatatctttacccaaaagagtttttgaggattttctgtgagtcccaaggggcacawatgtgaaggtcaaagataatgggtccccatctgacactgrgctgatttgccaagcacccaggatgcatttttatttctttttcatggtaaaagcmagagagaacactgtagagtttaaacacggtttctttatctggtgcccgcatggggagatgaaggtaaagaggccaatttatccagcaaatgtgcccaagcaagtcgggaataaytacctcccttgacatctgacaaaactttgctgcatccccacaaaaattctataggcagtccttccaagtcattttcagagaccccaccatggcaggtgagcttatttatttatttctattttgagagatccacctttctagactctcttttaaggtttgcctcctgtgtaatgaatggagatcagtgggtatttcattaccaggtatctccctgctgcaggcagtgcctggagaagtttctctctgtttagctttcaagcctcatttattttctcatgctttctactgtgggcagagcctggccgactacattattaaattactattattacactgtgatgtcttggcatgatcaggggctaagttggaaaagatagtgttgggcagggaacatgtcttgccccttccctaagctgccccagatggaccttggctggcttgttgggtctgtttcagcagcggaattctctgaagacaaagggaaggtctgatcatatttgaagcagtttttctagtaagtgtaaggaatgaacatttcacttttaagtaagtggcttttgatttaagatcaactggataattcatggtggtcatgtttttggggagaggggatggcatttcatattcaaaggatttgacattttaaaagttataatgttatttaaaaagctataatatcatgaatatatttacatgtagttcatttatgtttacacaagctttcaaaggctgtctattctcagcagagaagttttaattaaaagtattttattgccattcgaaccctccttaagtgaaggcactgttcttcacttctctgtttttctttctcatgcactcttgataatcaacccagccttatttacaataaaaaagttattgctattatattttaagtgatttctcatacaccaccatgtcaccaaagctatacaataccagcatatagtcagtgctcagtaaattcttgtgaaaggagtggttcaatacggcccatgcattttatggttcagccataccgaaaaatgttttagcaaagacactgcctggtccacctttggaattttacccaccactcagaagtgtcgtttgcctttcaagtcttagcactttttagactgcttatttgtgagttttctcctccgtcccctatctatgcacagttccggtgtatgcattaggtgcttaataaatatcttayggaatgagtgagttaccaaatgaacctatacttatacagttagccctcagagaaatcgtctgcggcagtttacaatttttgtaaacaataaaataataaaaatgaaatttgaaacattatttttcttgttcagtccttaactcaaaactctctaatgcctccctgttctctttagtagtggttttctaatgatgataatccgatcatgggatcatgcctttttcctgcttgaaagtctttcaaaggcttctcattacccttgggataaatgtaatttaaattctttaaacatgactgaaaaggttctaccgctccagctgcagttctccccacgcmttgtttactcttccacatgttgatcgtggaatatgttgaatccaggaggtttcctcttccccaggtccttggcatgttgggtttcctctgcttggggcacttttcacctcacttagttaactccttttatgtttcagttggtcttattttaaatattaccttctgaaggaggcctttactgyctattccctgycactaccactgatcaccaccactataaccccacctgcctctaccgatctagactattttccttctttgtatgcctttgaagtattttatcaatgaaatggaatagttgaataatatgggatgttttggacaactcatatgaaatactaagctaatgcaatttaaattgataatttctgcaatcttaagcttttctctcataaatttctcttcactattttggcagctcacatgaccctcccccattttcccaaagcatgcatatttattataggcaaatgctgtgctaagtgctttacatacatttattcatttgcttctcacaccagccttatagtggatactgttattatctcccattttattgaaaaaattaaattcattgagcttaagaaactcacatagaagtgaatggcaagctgaggtttaagtccatgctatatgcactctttttttttttttttgagacggagtctcgctctgtcgcccaggctggagtgcagtggtrcaatctcggctcgctgcaacctctgtctccctggttcaagcgactctcctccytcagcctcctgagtagctgggactacaggcacatgccaccacacctagctaagttttgtatttttagtagagatggggtttcaccatgttggccaggatggtctcgatctcctgaccttgtgatctacctatctcggcctcccaaagtgctgggattacaagcatgagccactgcgcctggcctatgcactcttattccctataaaaaatatacagctcgtgattagacaggtaaagtattcgaagacctggtaagtatttgaaatatgtgaaaatagccttgtttgtatattggttatcttcaatttatcctttcctacccactctctgctttgctctttgcttgggcagttctctgtgaactctataagtaggctcccgccttgtccctgggtattgcattaatccttggtttctccacaccatgaatacactttctaagcatttctgcagattaccctatttgagtattttgtgagtcatctgtttcttgcccatatcataatagatatagacagctttaaaaaaaaaaaaaaactgtggttgtgattgtgcttttgtaattcacatatagtataaagttgtatttacttctttccactttgtgtttaagtttgtataatgaaatggtataatggaattgaagattgccatatttcttgctgtcttgaaaataagaagcatgccacactcaaatataacgcgtgtgttttcaaggaatttgaccttgttgcaaattgggaaaccacagtcctacagaatattttccagaatccttagcctgacatgaggccccctgcatcatcttgacaagagcttaactttcttctcttttccactgagccccctttgcttactttaaaggttgactctgctttgtgtctgggtaggtagtgacccagatatttagtccatgattgactgccattaaagcaactcccttttttttacccatagaagtttacatatgaataaaattatatgttattccataaataaaagcccttatcataaatagggagtaaaagtttaaagagaagtacaaaaaataaaaagtaaaataatgccattcagattggcaagtgttactaaggtgtttaacaattaatgctgaattaatactttttcattgcatgtattagaaagattaaaatcaaatggaaagagatataactttattattctttggtttgtcctgtcagtggaccatgtaacaccaaggttccatgctttgatgtttggggaacactggtataatctatgtgtctgcccctgctgtgctctcaccccaaatgccttcttcctcctggtttcctttcccagatcttctccagccttctttttgaaccattccttcaycctctcagcctacacaaatctctcctcctcagaactctctgacacttattgcctgccctactcatgtkggcttttgatcattaactctttttagttgtcatttcagtagtttatatttcatgtcttgcctcccaaattatatgcaagtttttgtctctaaactatataacagatagacactgggacctatgtttctggaatttcttatctaataagagtttagtaaatgtttgctgagttgaatgaatttaaccaaagtcaggtagatgctgttttctcaactatgggtgtattagtcagttctcacactgctagtaaagactggctaatttataaagaaaaagaggtttaatggactcacagtttcacctggctggggaagcctcacaatcatggtgcaaggcaaaggaggagaaaggcatgycttacatggctgcaggcaagagagcttgcgcaggggaactcccatttataaaaccatcaaatattgtgaaacttaattactaccacgagaacagtatgggtggaagtgcccccatgattcaattatctccacctagccctgcctttgacatgtgggaattataagagttacaattcaagatgagatttaggtgggcacacaaccaaaccatatcaatgggtgtagttcacagtcatagtatgtttttctgtctggttgggatgcacttttttatctttgcttcttctcatcttcattgaagttacattctagtaggggatatacagaatgaacagatatacatctaactacatcatataatgtcgagtggagttaaatgatataaggaaagtaaatctgcatgcatttgataaagagttttgggttattttttagatagggtggtcamataatcctttgtgatgaggtgacatttgaggacatacctgaataaagtgaaggaggaaaaacatctgaatatttgggggtctagccttttagctggaagcagcaagacctgagggtctgagttgggaatgtgcttgatagaggccagtgtagggaggagaaagaagtggtagatggattccatatgtggccttgccagccatggcaaagattttagattttaattatgagcaaaaccagtagagggctgaaaagaaggaaatgatgygatctgatttatattttttagaaaatcatttcagctgctgtgtaaagaagaggctgaaggggacaagaagagaggcaggtggccagtcagaaggctctggctgtgtgccagggaaggcaagcatggtttggagcctggtaatcttagcacacaaagtaggaagtagtaacagattagggataaattttgagggcagagcaactgtgtcattccttctaatttatttactactatccaatgctttcaaagtagtattctctgttggcatttattttcattttacaattctgttaagccttaagttttatttctatttacccaatattctttcatatacagttgtttttgagatggtgcttaatgactaattagccagtaaaaactagggttctatctggggcaagaatgtgttcccatggcaaatttatttatctgacttttcaaaagtaattgcatttttgtattcattcttgaacactgtttcaaaaatgttgtcatttccccaaatgactatttgggagatggatttttttatgcgattctaattctgtattctcttccttttaatactcccatctccactttatattacaaacttcatcagactactgcatgctattatagctgtcgtcaccatgggaagaaaatgactaattgaaactgcttattgatataatagagcaggttgtgacacttggcgagaatgctggaacgatgggttccagctgatgttatgtaaaaatattcagccatgaaatatgcacttgtggatggctttctgcagatgtctgcagartgcagataatctgtcttctgagaaggtctgcaaattaaaggtctctctgaccagttagaattataccacagtgaggatggtgatgcagtgggtaatgaaatggmcttgaatcttgggcaataatgattataactgcctatggttataagcaaaaatgggtgatttttayccckactctttttaagagagaaaggatcagttggcagaaaaatgatgaacttttggttgttttggaattccttcaatgcaagatgtattggtatcatgaatagaagcatgaattgttatattgtctttggaaagctatttggctctaactatcaaaatagaatgcatatataccttttgacctagcagttccatttctagtaatttattttagaactatagtcatgcaggtgcacaaaattctatgtacaaaaatattcgccatggcattgcatttaacaacaaatgattaaaaacagcttaagtgtccaagcaataggagaatctgtaaataaattatggaatatctatactttataatctttgtaataaaattagaccatcacaaaaatgggtctatacagaaccatctctatgacatttttaagtgaaaaatgggttagaatatgccattatktgtagtcatggaaatttaaaatgtgtgtatatgttcacatatgcatatgttgaagagggtacagagatcattaacagcatgagtgggaagacatttttcaacgtactttggtgtggtttcaatttttcactttgtatgtatattatctatttaaaagctataaattaagacaattgtggatattatatctatgtatatttttactccctgatgtaaagatgtatttggttctttctgggctgtattgtacttgacttttgttttgacagtatttcttggtatggcatttataactttattttagaacacctaaaagtttcttttagaacaccttttatgaggatatcattgtgctgacacttctagtattgaggtggtgactccccttctttctttatttcttgtcatgactttatggaaatgtagttctaacactttcttccaatgcttctatccttcctgtccaggacagctatctgttcgaataaatggcaaaatcattcaaatccactggctattgaatatctaatgggtatatttatgaaaatgctcggaagcctctgaaattataggctcagttcttttcaacaacaaatagaagttaaatactagtaatactgcttattataaacttttaataagccctcttcttccccaacaaggtaaagagcaattttttgaactgtgtggccaaaagctgtgtcattccccacttttatrtgtggtatcaggaggccctgagaacaatgtttaaaatgttttaatcattgttattgaaggaattaatgtatggtactattcagaaatcccattgctcatattaggtttctggygtgagtaggggcaaagaagaaaaaaaagacatggaagaaaaatacactcctaaaaaagttaaataacaacttgtaaatttcattctctgttgttggaaaaccaagtcattatacatgaatctgtaaaaaaacaagtgttcggaacattgaggtgtatgaactatgtagtgtaatcagagcttattttcctgcagtggagattgaaatttatacgtttcttctaagcagcacctttcattccatttttattttctaagggagagtgaaatttacaaggctacttaacaataccaaaagtgttagttcctacacaatgaatagtgaagtttacaagttgccatttggcaatgcctacatttctgtttgtttgttcccccaccctctctacaaggtatartaaaatttataaggttcataaaaacccttcattattaatacaaggttatattgctggtggggattccacaaatagcttatgaacatatctaaagggagaagtaaaggtggacgttatgaggcaggaaattctttcaggaacattgaattgataatcatcattgaagaacatgcagatactcattcatggccttgtgtccctatgaccccattcccttggctccttgattctgttgtatcctttgtgtgtatttcattggaccttttttttttttgaaaaccttactcattttcctatgcaagtcttactcactgcacaaccgtccttccatggccattctcctccccttccattctctcttctgaacactcaggatggttattgtgtgcacgattaattaaataaatggttcatggccttaggacatcatttctgttattatctggcactgctacttaaatattttattattacagtattttattgttattaaaatttcaagatatgtattccttattttaccaattgtattataacaagctccttgatgggagatatcatgtcttaaaattccttatgctcccaatgggacctcgcatatagttgtgtaattgaaatgaagtggctgtttgaccaatcaggagaacagagagatgaagaaagtgaaaagtaacagatactctgtggtagcttgtctgcaaaaactgttgctaacaaatccttccacactgtctgtgcagacctcttctcccgtcaagaaataaagtcttttttctccccttgacatttgtttgccttttgactcaattcgatcaacagaaaatggcagaaatgcacagtgccagttccagatttagactttaagatggctgacttcactgtcttggagcctggtgccatcacttaaagaagtctgatcatgctgcaggagagagaccactccatttggaaagaggtcctgaagaacaacaaagacatggagagaggcccagccagcccccaactgtcccagccaggtcagccaagggcatgtgaatgaagggaagccagcttgcatcttgcagtctgtgttgaactaccccagtcaacaccatatggagcagagatgagccgtctcactgagccctgccaatattgaagaagcaggacaaataaattgttgtttaaagtcactaacttttgggggtggtttattaagttgtaaagatcacagaaacacacccaaagtgggataagcagtacattaaattttgtggtccrcagcagtgcttttcagactttaatatgcctacaaatcatctggagatcttattataattctggaatacagaaggtctagggtgagacctaagactcagcatttctatgaagtccccaggtgaaactgatgttctgttctgtggttcacagtttgagtagcatgggtgaaaacaggcaagcccatccattcaaagatttacaagttgcttattaytatcaggcagattatacttgcctttttgttgaaatttcaaattctgtactggctcattcatctgtatattagatactcaagtctcaacactatagagtcaaacaaatatgtgttttgaccaaggtacttggctgggcaagtcgtgttttcttcaagtctagctttcctcagagtcattatatgcccttaggcatggtgtctgtttaaccaacatggatgctttgtggcaatcattaatcatggcaatgctttcacctacagagtgcttcattgtgaaacaggctctgcactaagctctttgtactaaatctatttccctctaccctcctaggttctccagctgtggccctctaaagtagagtgaaaaatgacagattaacataagaaaaaacagaagtttattaacatgtacttgcacatacacatggaagtacccagtgatgagtgactcaaaggggtgattaaaatgtgaccttatatagctttttaaaaaagagcaataaatttttagagaaatggtaagacaaaggaaaggactttgagtttctgcarattgtgagaaggtaaatatatgggggaactaatggaagggctagttagtaaagcttgttacatagattcctctggtgtctcttctggctagtgaatatctagagttatctctgatgattaactttttctttcctgataggtggggagggcacctttataaatttatatcctgttttgtggcaaatagggggaagacagagagcttctctcatatctgcttcttctcaactgccttcagctcaaaataatcctcatgccaaagtggcatattttggggtggcatattctgccactcctcacctttatataacattttctcacttagtccctataataaccccatgggataactghcatcagtttgttgatgaataacctgggcctcagggaggttcagttaccaggttactcaatgagtaagccaggattcatttcccggtatgatcggattccacagtccaggctgataactgctgtgccacgtttacccccaccactgctcaatcaaaaacctagcacacatgagcttcaggccttcagattacatgtactgcagcttacattgtattctatttgtttgtttactagtttattcttattctagtagtagtagtatacatatttttcctccatgcagtataattgagttgggagatcctgacagaggtacctgaaatatgtgtgtgtacgtgtgtgtgtgtgtgtgkatgtgtgtgtgtgtgtaaggcagaggcggaaacacctttaaacccatgagatgggagatttaatttttttatagcaacattcacataattattgtcagcatcttacagtggtaaagtgctgatatgagaaaagtctttaccagaataaatatcggttattctttaaacctctatagtttcttgttttcattgtgtgttggctattgaaacaaaaataattttaccccctccctttgcttcagacttattgtttcattctctatggtatttgtcagacagaagctactactgttagaggttttcatcagagcagcataaaatacttcttttaaaaaccataaaaaagactctggtatgaggcctgtttgaaattagactgccaggacatctcttcacttgctggctttgaatgactcttctgtgttctcttgaaggttaaagaaactgacagtgctggaaatggcagtgcttggtggggccacaaccagtgctctgcagggaacccataccatgaatgatctgggtttaaaggaagataccaggatctctagccaggaggctttgtttagctctcaaatacctttactgtagacatgactgctcttctgaaatcacatgatgatgaaaatgatggtggtggtagtggtggtggaagggtgtgtgtgtgtgtgtgtgtgtgtgtgtgcatgcaaagaatttaaatggaactctcagtggcgaataagtattctatagaatgcagaaataaaaatccatgtttggtaaatgggtaacacacaaaagggtatcattaaatgcgactttttgtggtgccaacttaatccttattgtcctttatagccagttaaaggaaaaatatatttgaaaaatgtctggaggctgttccctgccggttccttataactagttacaaatatgatgttggaacttccttttaaaccacatactgaaatgcggacaaaaacaaaatgatagcttatgatagatactctgaaagtcaaaaacagcattggttctcattttttcctgccagcaagttacgagccatgactttatttctatytttaaaatctccggtttcttccctttgtaagtgggtaaaaccaaatttggattatcccaagataaaaagaaagggtgaatattggctcacataattgcaggtccagtggggtgacactggcttctgttatgggtggctatgtgtgccttattgtatcttcacaactgtctctcccaggggtgaatctaggattttgtggcccaaagctcatacagtttggagagccttctctataagaagattataaatgaccatatgaacacatcgctagagaaagacctgggccgggcatggtggctcatgcctgtaatcccagcactttgggaggccaaggccggcggatcatgaggtcaggagatggagtccatcctggctaacacggtgaaaccccgtctctgctaaaaaatacaaaaaattagccgggcgtggtggtgggcgcctgtagtcccagctactcgggaggctgaggcagaagaatggcatgaacctgggaggcggagcttgcagtgagccaagattgcgccactgcactccagcctaggcgacaaagcgagactccgtctgggaaaaaaaaaaaaaaaaagagagaaagacctgtaagcttaagatgtagtagcttcaggataaattcgcctctgctctcacccccctcacagtcctcctcttctccatgtggtcttcatcttttcttcagtcacagtctttgtggtgggggaagaaatatctctaagcagcttcagacttatgtgaatttaagtgcccaagatctcggaaagccttctctctaactgcagattcatacacttcccccagaagattttgattggttagattgagtcacattcctatctctggcggagagatggggcacctcaattgaaatcccaaaagaaccacaaagatttggggagagggtaaagggcgggacagtgcattaaaggaatcagaagatgagcattcaaaataataggtgttcatttctatgcttctcacctactcttatagatctaggaggggtgtgttctaaattaggtatatgaaacaccttttcaaacttgaattttcaggtcttttcagggagcaagccaaccttggtaagagcaaagaccatatactgaggcaggctgggaggtcaatttctggttttcccaagtcatatatcactaggtatcttttaaatgaaaggtactaggcaatggtatctgtctaggagcctctcccttgtatgtttacctagaattcactctcagctactctatgacaaatacgcattccgttgttcagtacagctttttgtcatagaagccctctgggaaattgtaaagaaaatgaaaacctgttttttaacttccttatttgtctttccacatcctttagacttccttgtcctttgcctcctctctggaatgggatgataaaaataaaatagaatgatgtggagtgtgctgtatccaaaaaaagtatagaaagcatctatatatacagagaaccacatcacaatactgcattatatactatcagcatatcagaaatgtaaacatgtttccgttccacaacgaatgaactcattctgtatggcagctgccatccatttaagattaccctcattttttttttttttttttcgagacagagtctcgctctgctgcccagactggagtgcagtggcatgatctcggctcactgcaacctccaccttccgggttcaagcgattctcctgcctcagcctcctgagtaactgggaatacaggtgcacaccaccatgcctggctaatttttgcatttttagtagagacggagtttcaccatgttgggcaggatggtctcgatctcctgacctcgtgatccacccatctcagcctcccaaagtgctgggattacaggtgtgagccgccgctccctgccaagattaccctcttttatagatggtatagttgctgcaatttctggaagtacatgttgagtatgaaaatattagctaaggtgtgacaacaataattaaaattacattaaaaattggagcataccaaaatgagaatatttggaacagctgggctctttgagggcaggggtcctgtcttagtcatttttgtgtctctcaaagctccacaaagtacccttcatatgttaggcattaaatgaatgagtgaaatgaatgattgagtgaatggctctgctattacagcttctctttgtgtgttgccctgcgttttcaagcttcgactctggtcatgatttctatctcttcactggtcccctcccttttttttttttttttcataagagacttctacatctttttatatcctgatcttttctcttttaaccttagattgctgacatttccctttccatttctcgctttcttttatagtacaaccgcctttgtctgtttcagtctctcttctccatagctttttgtgtctatttttccattctgtgactttcctcttttctagatactgttggtgagctggttactctgttgagttaaagagggcaccccattgtgccattgtgaaagaaaactgattaattgtataatgatataatttctactgtgtcaggggtcttttggggctacctactgaggaaatggactgctctataatggcattttcagcatagtctaaacctcaaagcacctgtacttttgttcttttttctttgatttaaatgttgatcttcagactttctttatattctctattttaaagataatactcatgactgaacatactatttttggatgctgtgtttgtaaaatttaacacccccactccatgccaccccagaattccagttattgctgatcttcttttctggtacaggaaaaagaactaattggaaccaattgaaccctccagaattctgcattaggcacacaggagatatcagttgcatgtaatcataagattggtgtgattaatgtgtttgctcctctaaacagacttatttatttgaagggcagagtagtattgtggatatgataataaactttgactctaaatttattaacttcaaattccagctactccacttactagcctgggcaagttattttacttctataggtttccattttgtctgtaaaatggatatatgtggtatcaatcacatagagttattgcaaggattaaatgagttagtattgcaaacctctctaaatagggcctgacaacagtgagcattcaaaatatgctagttatctttgattaatttttgtacagtctatcccaattactcttcccccttgaggatccagttattaacattttgttgtaattgttcattggctttttttctctcatttattatactttaaaaaatcatttgcatttcagtcatagatatcatattaccccctgacatttcaccttatacctcctaagatgaatatgtaatcataatactgttatcactctccacatgaaatttaacattgatatgtaatctaatatattcaaatgtttccattaatgtccctcataccttgtaatgtctctttttccttatttccattttctttttagaatacaatcaaggattacacatttcacttagttattttgtctctttggaccctcttaatctagaatattctcctgccttttatttctctttcatgagtctgtatttttgaagattccgacccagtgattgtggaataccacacaatgtggatctgtccaattgttcctcattgtaggccaaagtactatctaggtaatgttgcctgcttcacagtggatcacagcagagtcatataatttgtttgtgccagttttggtgatgctgtttcatcttggatattcttcaggtcactccatttttaaggtttttttttgttttgtgttttgttttgccttgaaattagtatctgtggggtgatactttgagactgggtaactattttgtgtcccaagaacctttcactcatgggttctattgtccatcgatgatttgtgcctaatgatgtttttctctttgtattattatacatttctgggctgacrttgtttcttaccaaaagaggtctccacctctgtttccatagtaggatggatgaccatcagtgtaatcagaacaatttattcatagagcacggtcttcctttctgctaaagtaaattatatgtcttatttgctgcttgtatcacagctttcttaaaaaaagacactacatttcatattgaaatayagcatacctacaaaaaaatacacaaattataagcacacagctcaatgaagttccacaaaatgatataactatacttagctccttattcttttgtgaggctcaaattgtctgtcatttagccagtgggatcccctgatgctagttcctatgtcgttttgacatatctccatcagtctttgagtatgtcctggagtaaaaaaagatgtatcaaccttaccttacattttccctaccccaatcaagaatcagtcaagccctgtctccctttactggagaatggaatttagaaagaaagttttggccgctaggtgggttcattgctactggggtgccattgccgctaggcgataggtagattagatagattagataggtagataagtagacagataggtagatgcatgtatgttaccatgtacaactcaaccattcaaattcaacatcacaggattcttccgcactttccctcatttcatatttgtatctcctttattccacagtgagatcctaatgtatcgattcatttgctctatcctatagtacacggaaaatagtttcagaattactatatcaatacccctcctgacaatcaatctattaagtaaagttcaagatttatttggacttctttttttcctaatattccactaaggatatacattcagaatactgtcttcagaaattatttgaatttatttttttcctctgtgattatttacgttgatgtgatatatcattagatccatttatgtcctgcctgtatgcaagtttaggttttgctttataaatcctttttaaattttttatttcgaatatgtaaaactttacatggttcaagtcaaaacttacctggttcaagtcaaaacttacctggttcaagtcaaaactagaaaaaaaaattgttcaagaaagtcccactccatccctacccttccagctccatttttactcacgctctttgaaaatattttcattagtttctggtttatccttcatgtcttcattataaaaagaagcaaatatacatacgcttcctttttatacagaagttagcatgctatgtatactctttcaccttgcttttttatcctggcaattatttcatataattttataaagatcctcctcattccttattacagttgaatagtagttctatgtgtatattggttgttcacacaaaggactactattgattgtatctatggatggcatttagattctttccagtattttttactggaaataacactacagtgaataattttatgtccacgttttttcatacagttgaaggtgtatgttcagggtgaatgctgtaactgacattgctggtaagtaaatatatagataggtatgtagaaagatagaaaaggaaatagacacatagtttgttaactaatgccaaatttccctttacacaggttatacccttttgcactctaactagcaatgcctgagaggaactgttgctctacactctgtttgctaatagagtatattgtcaagtttttcaacttttgacaatctcataggcaagaaatagtatctcaatgtactttttttggatcaacttttttgttaagaagagttttyggtttgcagaaaagctgtgaagatagtaaagggttcctgtgtacaccacacccaggttctcctattgataacctcttatgttagagtaatatggttataattcttagtgtagttttaatttgcttttctcttattataagtaaaattaagcatattttcatatgtttaagggcaattcctatatcatctgtgaactacttgtttttctatttttcttattctaaaaatgggttttaagaatttttttttttttttttttagaccaagtctcgttctgttgctcaggctggagtgcagtggtgtgatctcagctcactgcaacctccgcctcccgggttcaagcaattctctgcctcagcctcctgagtagctgggattacaggcgcctgccaccgtgcctggctgatttttgtatttttagtagagatggggtttcaccatcttggccaggctggtcttgaactcctgaccttgtgatccacccacctcagcctcccaaagtgctaggaagtacaggcgtgagccactgcgcctggccaagaattttaaaatatatattagggtgattggagcttaatctgtgatatattttataaatattttctcctatcatgcacttaattttttatttttgcttatggtattttttgctatgcaaattttaaaaaatttcaggtaattgaaattctcaatcttttttttttctttttttttttgcatttggatttgagttatagttagaaaggctttccccacatctagttgtacagaaattctctcatgttttctcctaatacttgtattgttttgtttttacattaatagttgccttgatttttaaaacaaatcatgttggatctcaaggcccagctgaactcaaaggattaattccagtagaggttggttactaaaggaaaaggagaaaatggagaagccatattccctacctctccctatctctcctaggcaggaagattgggaattttggatcattagtgcagggctcagcagatagaagtcatcactgagtaactgaaaggatggatgaataaatgaaaatctaaatagatgaaatgtcttacaaatttgctacctctggagaacctgataagcaccaaagctggaaaatgagaaatggaaggacaaacaagtgatactctttctcgtttataggttgtcaggtatgagaaaccctaagtaccttggatcctgggagggaaggctcagcttttgaaaagggctaggcctgtctttttcattcttgtttcctttgtggagtctcctttcttgattttggttactttggaaacagtactattttgggtatttatcctccagaggatataggctagaaaaacctgacttcctcattggcagtccaattcttggagccatcttgatgccagatgtacaatcattttttccttgtgtatttttgctatgtgtttaagacaccaaatagctgaattaaatgtgtaaaattggctctgaaatccagatgtttagagatatagtgcaacttcatttattaccatgtgataatattatatgacagcataaacattctacatcttaatgagttagatgcactcggcacaattatgtataaaggaatgtagttgctaaattaattgtgttgtgatggtttttataactgaattttaatttccaaagtgtttgcttcatgccttccatctaacttagaagtgtgcactagtttcagtggtccagatttaggtctttatttggcctctgccagttagtactttaacttaaaaagtattttatgttctctaagcctaatcaaaaatgggtttaaaaagttactttagtgatatttagaatgttaaatgatataatgtaggtaaaatacctgacacaatgcctaacacaagaatatactcaagaaatacctctagttacaattattgttcattgatccttatataagcactggagttctgcattgatccttataatgcctcttgattctctctcaccgtcatcacttaatatctccttttcatatacaaattattttgtgtgtataataatcatacattttatttttcttttgtatttgaaccaacttagtttttttgattctcaagataatattttagaatgggtaaggaattattctctgcattttggaaatgaggaaatacaggtttataggagtaaagagaattcttgacattgtatacttaggaagtagtaagtggtaaagttggggtgtctgatgtcaaaaccattttttgtgtcttgtttccaagactctcttgtaacctccttgatgaaagatttctytctatgctgtagagtcaagagattttagtttcaggaatgagggatataatcaaaattggcctaggctagaaggaattttataggttcatgtaactgacaggtctacaggtagatctttaggcatgtctggatccaggtgctcaaactaggttaggaaggtatctcatccacttagttgcactttgcttcctgttggctttattatcctcaagttggggctcccttgtggtggtgcaatagctaccagaaacagtttccattataccatcagtaacttcttaccaatagttctgtcagttgtcttgaatcgaaaattgttacatcaaaccatgtgcccagctctaaaccatccatattatcaggatgactgaatatgttatttgatcaggcctggctatgggcatctctggaactttcgggtcagccctttataaaccacatgacctgaaaggaagtatgggtgatttgtgaaatcataatccaaatcctattaccatggataaataaactgtggtatatccataaaataggatgccattcagcaataaaaaggcataaattactgagatatgcatcaaatggatgaatctcaaatgctttacactaagaagtcagacataaatggtttatgattgcatttatatgatgtttttgaacaggcaaaattatagggaaaacaaatcagcagttgccagaggctggagaattagggtaaagattgactatggcaaagtacatgggaactttttgggatgatagaaatgttctgtatcttgattgtggtgtttgttatataactatatgcatttgtcagaattcatataaatatatactaaaagtgtaaattttactatttttaaattatacctccataaacctggctaaaaagcaaacaaaaatgctattacttaacagaggaggatactgaggaggtacaaaaaaacaaaacaaaacaaaaatccccaacgcgaggacaaaacagtacttatgacgtattcctagcttatggaataggatcagtagcagctagatgagtggttctcagtgtatttttcaccaccacacatattgttgagatgcccatgaacttccttgaacctacagtgtttgcttgtcatcctagtacacatgctgaaatcccatctctttctctagaaaaaaaaagtacctagctacaagtgaatgagaatgacattattgtagagacaatctttcaaagatatcagatgttagcagagggtaatacttagttgttactgctrcttggacacccagtgtattattttgcagcaccatgatttagaaactcttgcttcagtaactacactttttaccttttgccgtcaatgtttatttgatgtgtaatgacttagagttattctttaaaatgtttttctggcctttcttaagtgcaagtgagcccatactatacatattattctgccacatacttctttcacttaataaaagatcttaggcttctttccacacttaaagtcattgttatgttatttgtctgagatggctacatccttgactttgatttggatggaacaaggtaatgcacagtttaagagaatgtcaacatacttagtgatcaagacaaatagtttaattccatttttttcaaaaatcaaataaatgccagaaaaatccatgatgaacaaaacattgaagttttaaataaggattagtacagtgccaagccattttggagcctaaagctaaggaaaaacaaaataaaattaatttaaagaaagtaaattgtttaattaaaaatcatttatgattgtcactaggtgataagagaatgtcaaacatggtaattcttccattgaaaagaagacaaacaaagaagtaagttttgaaaacatgtttaaattactttgtcccctagcctggccaacacagtgaaacttcgtctctactaaaaatacaaatattagccgagcgtggtggcatgcacctgtagtcccagctacttggaaggctgaggcaagggaatcacttgaacccaggaggtggaggttgtggtgagctgagatcgcacgactgcactccagcctgggcgacagagagagactctatctcaaaacataaaaataaaattactttgtcccattagagtcaggaaagtgaaattataatgaattctgattttagtataaataaaatatttacatttaatattgtaagttttaatatacctactttccaatttttcagtatttcttcaatgactttaaggttctccaaaaaaattaatttttaaaatatattaaaaatgtaggtagaagtgtccatgcaggctcaaatatggttggcagggcattaatatttatttaaaattgtgttttcttcaccatgatttttttggtttctaaaaagattgcactgaagtattattatcttgattactgaggatttttcttttttttttcttttcttttgaaatgggcatctcactatgtagctcagactggagtacagtgactattcacaggtataatcatagtgcactatagcctcaaactcctaggctcaagtgatcctcctatctcagcctcccatgtagctaggacttcaggcatggccaccacacctggctactgaggttgtttttagttctacttaaattttgtacctcatttgctgcaccctaactgtggccctgaatccccattactctgcctcttgaccaagttggagatgatcttgaagtaggagaatcaatgacagcagtacaagtcatgatagtgagcctttctgacctcacaaagtatttgtaccagtagcctgctatcttgaagctgcccccaactctttctttgtattgccatttaggtttccctgagctttgagcagattcttagctaggcaaagtagctgctggggcccaatgagtgggggatgctcaactgaggactcctgtgcccagtgcrgtatgcagtgttcagagagatttcccttttctgtgtttgatttgcttttaggagcctctcatcatgttccacttttcctcagcccctaccatcctgtttctttattatcacattccatccccataagcmcagctgaaayttttaaaatcctgggattatggtcagtttttggcatctcacaaagatgtatccctgagccaaggcagcctgataatcaccggctgggttttggtatcctggtggttaagccacttttgcacatattattgagtgactgttgaaagacttcttgtgaggtgaagagtctctggcacactgttggakgtgacaagagctccatgaaccccggcctttggctccagttttaggagcaggtttcctttatttgctgagcagcctttaccgttatgaatcttgcctttttgcaggaccagtggattctgcaaaggtttattaatcttgatttaatatattcacatgaaaaaatacaacagtgagagaataaagcttatgtaggcgttgcaggggtccctttgggggttcactttatattactcatagcagtgaaaagtaaaaatggcaagttatattagctaagttcgagatacaaaaggcaatattaatttcacaggaagtgtaaaaagatatgcaaatgtgatcaactccgaggaaaacattgcaatataccactccaggctttgaaattatgcagtttaataaacacttgttaagaagcttcacacaccaaatatcgaattttaaagcaagtgtttctgatcacgtactgtttttcaggaatggcattattttcctaagcttttggaaccctaaactrgataattagggtgttcaaagtagcggatttatctgtagtagttacatgttcttgggaaagcacagatggttctggaaaaaaaatgcatgttattgtttttcaattraaagcataatttagaartgtaggccattagactagaacctgaagtaaaaatttctaaggccaatgtgtttatacagaaactgacaagggagaattatttatggatttttaattggtacagccctgatgagagaagctttcccataaattcctttccataaatttcttaggtctatgcttcctgtatgggatctatcctatgcatttataaccagaaccaaactcgggctcctgaagaatgtgaagggctgttaggaagttgtacaggattttaacatcgtaaagactgagctgtgcaggaagagtgaaaaaaatgttcttctctgagtgaaatggtttcttaggacatttcaatagacagcttagagcctaggaacaggtttacagagttttgggcagacatcagtaaygttttgttctaaatttgcttatctggtgcttttgcagaactttacactgttgtttagtcttgctaaatcaggagataaaaaggattacagagaaagataacactaatgtgggttcagtgtgggtaaagggaacccaccatacactgctggtggcaacttgaccacgtatatcaaaaccctgaaaatcttgtgtactatttaatcctgcaattccacatttaggtatttatcttaaagaagcatttgaacaaattcatgaaggtgtgtgtctgagtaaattttctcagagytgtttacgatattttttttaaatcctaagagcacaatatttggttcaatattttatgtctttatacagtataataccatgtagccttttaaaatgcctttgcagacaacttagtaacatggaaagatgtttatattaaatgaaaatggaaacagattacaaaatagcaagtatagtagagaacagagggtttttttaataggtataaaaagaagagagtttttaaataggtgtgtgtttacatatatgccctaaaatattaacagttccaacatcttgatttgtttttgcctagctgtagttttaattttatcctaaaataaacatggattatttgataataaaaataataagagaaaatgtacccatcaatgagagacaataaagtatactattggtgattcttgctttgtgaaagtatgtgattataaaacagatttgtactactaattcttatttgctctagagaaagattcctatggttatgatgagtgagtaatgtgttctttagtaatttaggtttagtttacagctctctagtgaagctggcctgctgasgaaacctggggttagggaaaatgaaagggatgcagctaggaaatgaagggcctgcagaaataaaggtcatgcagttttgaagttgcccagcggtcagtaggcaaataggattttcttcttacatacattcccatgtatagtgtaatgagggatacttaaaaattagccagtataagaaattgctttataacaaaaaggaaaagcacaaggaaaggtttttcacaattcaaacttcagatgtagtaaaatctgattgtgtaaagttagaaattaaacaaaatcctctttggcatggcaaaaaaccataaaccacacgtaataaaccaggaggaaatagttgcaagatgtatttctgataaaatgctaatattgctaatatatagaaagttactacacgttgaggagactaaagagaccataaatccgatagaaaagcagcaaagacctagaaagttcacaaaaattgataaaaaagggtccttaagtatatgaaaatatgttcaacttctctcataataatatgtgcagcatcatcgtggttatgttgtaatgaggagattgtttgaatgagccataatacattaatgcagtagtgtgctgtaaaataggatgaggaagatccctgtgaatcgggattggagtgatcaccagaagatattggtagtgcaaaaagcaaaatgtggaagactatatatagcatgctgcatttcaggtagaaagaaggggaaataaaaatgtctttatctatgtgtctgattatttttgcaaaaggatacacaggaaggataaactagaagatatgaaattggtcatctacagggtgggaatagcattagaagagttagggaaggaagacagtgatgtagtacttctctgaatasctttttatatagttttgagtttgaaaccatgttcatggtttgtatattccgaaataacattaaataacaagatgggggaaattgagtacagagtaaatgaacctaactatatatcaaatggatgacatgattacacataggaaaaaaatactgattcaagttattttgaatgcagtaccttgacttcaatttggttggaaggtacctgcccaggtggtttcccagatgggcatggccttcaatcaaacaacagaagtactggaaagaaatcttgaactttatacatttgttcttggttgtgttattkgtgggacaattctgaaattactttgtatccattgtaggattaagtaaatgtattattttgtggggagtcaggcttatcactgtggaaggagggcagtacaactgtggaytggggaaaggcaaggaagagcctgagctattggatggagattagaagtatcaataggaagacatgactcaatatatatttataattcttacttgtcctcttaaagggcctgcaagcaataacactcctagcagcagtgaacacactgagtgcccagctcttgctttctaaatagcattccccactaaaaataagggcccttagaacagtggtccccaacctttttggcaccagggaccggtttcatagaagacaatttttccatcggtggcaggggagcggggatagtttcaggatgaaactgttccatctaaaatcatcaggcattagttagattctcataatgagtatgcgcagttcacaatagggttaatgttgccatgagaatctaatgcagctgacctgacaggaggcggagatcaggcagttaggttcccctgcccsctgctcacctcctagygtgcagccagttcctaacaggccacagactggtaccagtctgcagcctggaggttggggatggggacccctgcttagagcaatgactaattgcagtttcagagcagggaaaggacaagaaaagcctggaacattttgttgtgccagaaaataaaaactgattaaaaaaaaaatgaggacctgtctgaatgacacaggaaccagcttgaaatgggacacttaagaatcaaatgagtaagatataaccaaaagaaagaagaaagaaagaaagaaagaaagaaagaaagaaagaaagaaagaaagaaagaaagaaaggaaggaaggaaggagggaaaggaaggaaagaagggagaaagggcagctgtttcttgcactagaaaaccaactaattgctgtgaaagaaataatagagttagaaaaatcacttttttacaactattatagtaataattgattcagagtagaattgtcaataggtgttaaaccattgagtgaaagcttgttgattagcagggtgtttacacagtcagaaaaaagtcttcccatacattattaattataaaagggaaaaagaggaatacctgcacatacacacacatacagtgaggtaatctggcagaaaacaccttatttaaggaatcaaggttaacacatcaagaatgggaccaagtttcatcaggtgccaactgatgtaatgcaatgagaaggatatgctatcacttaggtagtatgcctttcaaaaasatgtactatgaatctaatcctcatataacagtcagaccagcatagattctctgaaaagccacaggcctgtcctcttcaagaatgttaatgacatgatgggcaaaggaargctgagaaagtattccagcttcaaggaggctaaagagacatgacagctaaaagccagtgcgatcctagactggaggaaagtggccatacaggacactcgggattgaagaaaagtaaatatggactacgtgtaagatagtattctatcaacgttaaagtccctgattttgatcattgtatgtgtgagagactaytgtaattcctagaagcttttaatgttcacacctacaccgaaatggtttagcaaaaaccacttttcatttgtttgtttgagggaaggggagcagaggaggaggaagagataaagcaaatatggcaaaataatagcaaatggatgaatcttgggaagacagtatgggatgttcatgatatgattcttgcaagttttccacagttttgaatattttaattttttaaagagtgttttttgtttttttgtttgtttttttttgttttgttttgaatactaaaagctctttgaattttttgccgagccccagagctttgaatatcaaggagcctaactttccagatgcagtgactgcacttggcctccatttcaagatagctcatttcattctctttaatgctgtcacccaaatgactccaaggggtatctgtgcgtctcacatcatctcttgactaaaaaatcctttcacccattgctgtgaaattggatcctggggtcaaggggtgacagaatttatgtgctccttctctcctggaagtaccataattgtttgcatccctgaggcagcatagaatgccttggaaaggacggggtgactctgggaataagccatgcatagttttgtctggcacaggggagaaagtgtccaataatgttcacctgaaaggctttagccttttggaactaatgtatgttaacgtttatttgtatctaacaatagccttttttgatgtggttaactatrcacgaggttaagaatgaatgtcatcctttcccatcttttgtttcagatgccagataaaccaaatcaaacaaaagcaacccccatccccacaataaaaagcatgctaaatgtttgatgtagttagtgaggatgaatttagaggttgtcagaacctaagtgttgatttcagggraggccagattcagagaattcattcttggcattctgacaacagtgaacctttcccattattctagaatgggcctcactagggaaatataaattgtataccacccttctgggatttctacctgactttgattacttgtcctaacccctatgtggtgccttgatttctctctcttggtttgtgctagtttagtgatagtggatggaatccttgactttaatttggttggaaggtacctgcccaggtggtttcccagatgggcatggccttggggtaaacatgaaagggtcagccctggagctaggtcaggtgcagtggcagtcattaggcattaaggatggcttggagagatgtggttgcctagcttagcagaagttattctagctgtcaagaaaagtataataccaacattgcctacatctgtggcaaatcttgtcacacaaaggaaactatcaggaaagagtatggctttcttggcatctacagagtagagtaatcagtaaatattggctacataataattggaactaactttaataaatatatatttgtacactttaaagtgtaggaaaaatcttccctttaaccattttagtttcttggctagggctctataacaaaagacagattaataagagaaaagcatacaaatgtatttaatacaagttttatgtgtcacgagagcattcataaggaaggaaaatctgatgaatcagttaaacctgagtgcttttatactaggtttgatgaagagtggaaacttgtggaaaagcatatgaactaagtgtagtaaactaggggaaacttaccaaggctggttcctggagtttcttctccgtgtgtccctccatcttcagagataaggatgctccttttctctgggtttagggagggacctctcacacaaggggcttctgacctgcttcagagagtccttccagcacatgctgtttctcagactccttcagcttaaaatattcaaaatgccaaggtgccatgttttgtggtagcatgttctgaaccccatcaaaagtcatatgtacccattgcagaaaatctggacaacagagatttctataaatataaaagtagacattaccggtaactccactatgcagttaaagctgtatttttttaatccatgcatggatattttaacatagttgtattttgtagttatgtatcttttcacttaaccttatatcatatgcatttacgcatattattacaaagtatttataatcataactttaatgactaaatactattctcctagatggcagaatttaattttcactctactgtagggcatttaatgtctttctaatgcttttatgcttccagtaatgttagtatcaatgtttataaatttacttgtttgagaccaacaaatatttatttataagtatgcataatttgcctttttcccaccttctcaggagaaaggatagctgcttctgtcctaagaaggtgctgagcagagtaatagcaggagttatagacgtctaatatacattacactctaatatacactctaatatacattacaaaagacaagggaattacccagaggtaaagctccaagggtggagagcacagaggtgacctgagaaagggtgtgtggtgggagagggctggttgagttggtgggtgtcagtgagaaagagagcaagggtagctgtcagtgttaaagctgagagtattrgaaacaatggcagtgccttccaggggaggctatgggcttgcttactttatatttagccaaaaaagatgatttacatctactattgctattatttcaaaaagaggatatgttaacaccaaaagaaaaaaccaaacaaacctggaaggatgaaatttcaggctttaaaagtgaaatgaaattgctccattaaaacctatcaaagtttctttatttttctcattactctgtggactattgatgatttgaacatactctggcaacagatcccaatccatggactgacattggggagccataagaccaaatcacctttaaggtccattgattcaagcaacagaaacctcgcatttcatgaagacttggtttccagtcttggtgccatatttgatttgatggatgacttttgaaccacatgtctcattaatgtcttagtttccttgtttgctcacttaactttatgaagatcaagtatgatattgttttttgaagtgctgttgtcttaacgcccgggtactttctgatctatggctcagaaagggagtgtaataaattgtaataaattgcactgtcccagaaaataaatggcattccatcatcccatagttgtgcagcagcccatcttttggcagtttctgagaatgattgcaagagatagcaaatacaactcaaaacagcctagatgaaaatgatattttattggcttatatactgaaaaaatatagacacgtatgacttctagaactgctggatccagaagatcaagtgatctatgcattgtttgttcttagggtttatctccctggaatggcaaaaaggctgtcagttatatatacccattccattctaccagtttagcaacccagtgggaaacaatagagtttctcatttccaatagtattggtgagagttcaaagttttgatctcattgacactgtcttgagttatatgtccagggtgatcaacctgatctgggtggtgtgcccatgcctgaagctgtgggtagaatcaaacccttctgagcaacatggactaagaataaagatggagtagtttttcagaaaattgggttgctggtaaaagaagatgggtgcacggatgatgggaaggtagaacaacatagagagagctactataaagtagcagtagcctgtcaagccaggaaatgcagccagtagaactgccctggcctttctaggaaggtcttctaggactgtgtgtaagacattctctactgactgccacaacatcactgtatagtgacaggcagtgtctttggcatcaattaaatcctaataccactaagcagaaattaaaaagctttaatgagatcttcaacctattgaygaatgcccatgacagtagctcatgccattgatgtgtggagtcaaatatctttacccactggggatgtcatcatttaaatggccctattgattttgagttttggcagagcttctttaaccctgggaggctccaagttgcctgaagggacgtagcctaagacataactaactccatgttatgtagtcatgaattggacccaaactaacttaatcatctgtcctagggcagtctgttctaggcagaatctctgggaaaactagagcagttcattttatgttttatgtttattgatgaattcatttggaaaagctgctcctaggcattccacacattctagtcatataagagggactacttgcacagaaaatgtttaattattgtaccaagtttagatgcaggtttacaaaatgaattttcaggttatcagtttgggttattgtttcagttattgattgctgtgtaatagactacctcaaaacttctgttgcttaaaccaacagtgattcattatttttcaaggttctgtaggtcaggaattggggcgtggcttggctgggtagttgttccgctccatttggtgtaggctgggtcaatcactaggctgcattcagctttcggctatgctgccctggaagatcaacggattcactcgtatctgtgcattggtgctgtgcacatgacctcagtctcttcacaagtgtttatcatgtagtattctggattggccttttttttttttttttttttttacatcatggaagctaattttttggaaagtttcaaagtagaagctgccagccttgttaaggactacctggaagtagaacactgtgacatctgtgcactcaatgggccatagcaagtcagaaaaccaacccatattcaataggagartacattattaaaaatagttttactgatgtattaagcatgtgttgacacagttttatttggatgttcataaactctgactgaaaagattattttaaaaaactgagctggagctagcataagggtatgtgcacagacatagacatatttttaaacrtctatatcttaaaggatcaatatgagtttcccsttttgacaaaaaggattgcatatctcattctgtttacctttttgtcctgtctaccaagaagcccagacgtaaattgaatcatattaacccaatttgcctcttcttttgattcctggctttgattttctcttttgatttacttacctatttctgtcaatatttattttgagcctattgaggaatggctgcatatacaatttttaaaatgaaccacccatacagctatagggtactacactgtagcatatactacattgtagcatgaaagcttctaagctacagtcctcactattgcctccactggtaaattgttttttgtaggaatgaactrgaagaatgtttgttcatcagtgagcagttggtctggcatatagaagtgctctatagattgtagctattaaaaattgatctttatataaatgaatgtcaaagtggttgttatatataaagtttcggtgccgcaaaagaaacggcatcgaatataaaattttcttttaattctcagcaaggcaagttacttctacagaagggtacgcccttacagatggaacaatggtgagcgcacacttggacaagggaggggaaggtgttcttatccctgaggcacatggcccctgctgccgtgtcgttcccctgttggctaggattagaccacgcaggcgaaactaattccaattggctaatttaaagagagtgagggggtgagtgctttggagggaaaaaaaatggttatgcagcgtggagaatgagtcagggcagagcaggtagcaggtaatcagaatgagtcagggtggagtaggtgatcggaatgagttggggtggagtaggaattggaatgagtcggggtggagtaggtaatcgaaaaaggttactttacgaggaagttaagtttaaaagtagaaggcaaagaattgaacatactggcatatttattctttgatgagaaatttagaacttatatctaacatggtgaaatctgaggtggattgtatcaatgtcaatatcttgatttaccattgggagaaactgggtgatggatacaaaagatctgtctatattatttcttaccactgcaagtgaatctataattatctcaaaataaaaagttaaataaatacatgttacagaactatcacttttatatgttccaaacaaaaccattgttcttatatggacattatgcctattgaatgtaatcaagtaatatcttaaatgtgtttaaatatataccaattagttggttgccggctgtgaaacttttcatttatatgaatatcttatttctttgtcttttttcctagaataagtcaagaaacagaaataatttgacatgttattctaaagctatcatttaaaggagatcaataaacctatatttttttttttcttagaaagaaaatttaaaagggatcttcagctcaggatgtgtcaggaggaagtgggagatactgacactgaccccagaagaaatttgaattggaattggatgcgtagaattctactataatctttgtattcctatgttgaatgtgtagcggctttcccttgtatcctcgccaccttgctgccttttgaaacactcaggaaatatagttggctaaaactgaacaaacaataaaccttaggcattgaatggagttggagaaaatgcggtgctttakcatattttaactgttaatgtgcaacccaaatgtccctggaccctgaagggcatatccacatgtcctcaggagttaaagtcagattacaaccttccctccagkgttcacagttcttggagtgttagaaagctcataacctgggaagcagaagccccagatttcaggcyggacttaattaccaacttgttgtttctttggaaatatcatttaatcttttagggattacacttttccctatcctcaaatcaaggagattggatcagagttcactaagagtccttttagctcagatatcgcattattttccatatagacgttcatgtttatcaatcaacatttgtaagggaaatttccttttatgttttcatagaaaagagtacttatagacaggctaaaattcattgtttttaaatagtctttgcttgtctcctcctgtcccccacaccaaattcctggcactacctcagctgtgactgatttcttgacatttactacattctggccagaagtcagaacccttttttggtaaaagggagcttaaaatttcaaaattatttactctttttttttgttttttgttttgggacggagtttcactcttgttgcccaggctggagtgcagtggcacagtctcggctcactgcaacctctgcctcctgggttcaagcgactctcctgcctcagcctcttgagtagccgggattacaggcgtgtgccaccacgcctggctaatttttgtattttttagtagagatggggtttcaccatcttggccaggctggtctcgaactcctgacctcagatgatctgcccaccttggcctcccaaagtgctgggattacaggcgtaaggcaccgtgtctggctctactatttttatcttatacactttaaaagcgtattttaaccarctaatgagaaaaggcatatatgtaaaaaacaaaacaaaacaaaagtcctaacagaactgaacaacaagtttaagcagagaaaaatagggatcggaagaagtcattctagacracctaaacaagttagttctgctctgagcttcttagatggccaaggccatctaagagaagcaagttacataactgccattagttgcaaaaggaagaataccactttgtcaggagagacaaatttttcctaactgtaagaaaaactttttatatcaatcrttatatatatgatggtaaaaaaataacatagttgataacatttgcaaatatagtcaaatgaagtttgctgtgagattatagatctaattgtttcctagattcaccctggataacaaaccacggcatgctataaactggaactctgaaaagacatttgtacaggttgctaatgtattatgacctaggtagtagatagtctagatagcctttctactgagctaatttggtgtagggatagaatgttgagtaaatggaggaatgtattaactggcattcaagaatagcttcttcctgacctaaccaggaagatctatttaaaaaagaacaatacagacagagggtaggactccatcataccgtttttcatgacaatgagtacttggaatttgtttcttcagraatctctagaatgtgtttttttctacctctagatcagctttaaaaccctacctttctgtcttgatgccaactgcccctctmttttttccatatactaggtttctagcaaccacagattctggattatttctcttaccagaagtcaatgtgatatttgctaaataccattgtccctatgagtattacatgaaaggttgcttttaccactcttgatctcttagccttctgatgataatgacatattaattatggaaaagccaagaagattgcaggcaaaaataatagtttttcaagttsttctcatgaatattggatcactttcttattagcataggygccttgccaagatttttcaatgcttgtaatttggatggcaagcatcctggggagggatcatatttgcttgtgtgctctgcttggcaattggcctatttttagcmattcatggtattaacccccaaataagataatcaaatttgtcaaataaaccccagataattgagtcttatggattcgatattacataaggatatgatttaaaaataacttggtattaaggcaaagatgygttttatttatttaagtttattcatttgtgcaacagatatttattgagcatttaatatgtgccaagcaatggtttaggaaagacaagatattgctctcattgagcttttattttatttgggagagggggaaataaatatgggagccaataaatgaayatggtaagtcaggcattgaggatattcctaagactgtaaaacatatgaatgtgtcagaggttattggtgtaaaggacaattagaggaggcatctggaggaggtgatatttgagctgagagttaaatgtcaagcaagagcccaycttgcaaaatattttgggaaaagtactccaggtagagaarttaacaaatataaaagacttgttgccataataagctcrtgatgtatcagaaagaggaaaaaaggccaaagtgactggggtagkgaggttgataattggtgaggaggtagaagtggacaagagtcaattttgaagagtttcatagaccttggctgggagactggaatttctcataagagtaactgttaaacaatgaagagttttaggccaaggcatgacatgatctgatttatattttaaaatacttattattgctcataagtctgtcataaaaactctcttataagattttcagtggctaatagatcactttttgtatgcagaagggtttatttactataatttgggcttttaacaaaagtttaatttattaaagatatattttaaacttaatgttttttattattgatacataataattatacatatttataggctcatgtgatactttagtacatgcatacaacgtgcaatgatcaaatcaaggtaattaggatatccagcaccttgaacatttatcatttctttgtgttaggaacatttcaaattctctcttgcagctattttgaaatatgtaacaaattattgttaactataatcaccctgctgtgctatcaaacactagaacttattccttctatctagctgtctttttatatctattaaccaacctctcttcacccctcttgccaccctttccaggctctagtagcacccatcaactttctacctccatgagatccacacttttaagcttccacataggagtgagagaatgtaatatttgtctgtcattcttattatttttcttcttcttcttttttttttttttgagaaagggtctcagtctgtcacctaggctggagtaaagttaaaatggcacagacacggccctctgcagcctcaattttctgggctcaagcgatcttcccactttggtcttccaagtagctaggacagccagttaatttttttatagagatagaatcttgccatattacccaggctggtctcaaactcctgggctcaaataatcctccctcagcctcccaaattgctgggattccagatatgagccacttagcccagccaatatttgtctgtgttkggcttatttcacataaaaataatgacctccagttccatgttgctgcaaataggattttattattttttaaaatatattttaggcttaattgtataaaataagcggaatagtatttcattgtgtgtatataccacattttctttatcttttcatccatagctgatggacacttaggttgattccatatcttggctattatgaatagtgctgcagtaaacatgggtatgcagatatctcttcaatatcctgatttcctttctttcagatatatacccagcagcaggattgctgggtcacattgtagatatttttagtttttttgaagaacctccatacygttttccataatggctgtactaatttatattcccactatcagtacactagcattcctcttttactgtatcctctccagcatctgttattgtttgtctttttcatagtagccattataactgtggtgagatggtatctcactgtggttgtgatttgcatttccctgaggattacggatgctgagcattttttcatatgcctcttgtccatttgtatgtctccttttaagaaatgtctattcaggtcttttgcccagtttaaaactgaattattagcatttctgctattgagttgtttgagttccttatatattttggttattaatcccttgtcaaatggatagtttgcaaatattttctcccattctgtgggctgtctcttcattctgttgattgtctcctttgctgtacagatgctttttagcttgatataatcccatttgtctattttaacctttgttgcctttatatttgaggtcttatccaaaaaatctttgcccagaccaatgcccagaagcattttccccaatgttttcctcttagttttatagttcgaggccttacatttaattatttagtccattttgatttgattcttgtatatgtgagagacagaggtctagtttcattttttctgcatatggatatccagttttcccagcatcatttatgaatagactgtcctttgcacactcaatgtttttggcattttgtcaaaaatcagtttgctataattaaaggatttacttctgatttatctgttctgttccactggtctatgtgtttgtttttactccagtaacatgatgatttagttattatcactttcttgtatattttaaagtcagataatgtgctacctccagctttgttctttttgctggggattgctttggctatttggggtcttcagtggttccacataaattttaggattttttctaatcctgtgaagaatgatattggtattttgaaaaggtttacatcaaatctgtaaattgtttttggtagcattgtcattttaacaatataagttcttccaattcatgaatatgggatattttcctttttttgtaaccagatcttcaatttcttttatcagtgtcctgtcatttaattgtagagatcttttgcttccttggttagatttattcctaggtattttatattttctttctgtagctattgtaagtaaggttgctttcttgctttattttttcactagttcattgttggtgtatagaaatggtactgatttttgtatgttaatttgtatcctgcaactttactgattttgttgtctcattctaagaatgttttggtacagcttatatgggtttctgtatttaagattatgtcatctgtaaacagggacaatttgacttcttcctttccattttgaatgccctttatttctttctcttgcctaattgctctggctaggacttccaatgttatgttgaataacagtggtgggagtgggcatcatggtcttgttctagttcttagaagaaaagcttttagctattccctgttcagtataatgttaggtatggatttgtcatatatggccttcactatgttgaggtgcacttattctatacttagtttgttcagggtttttatcaggaagggatgttgaattttcttttctttttctgcatctattgagatgatcatatggtgtttgtctttcattttgttaatgtgaagtatcacatttattgattagcrtatgttgaaccgtccttgcatcgctgggataaatcccacttgatcatggtgaatgttctttttaatgtgatgctggattcaacttgctagtattttgttgaggatgtttgcatcgatgttcatcagggattttggcctttttttgttgtgtccttatctggcttggtatcagggtaataatggtcttgtagaatcagcttgaaagaattcccttctcttttattttctagaagagtttgagaaggatgggcattagttcttctttaaatgtttggtagaattcagtagtgaagctatcaggtcctgggcttttctttgatagaacatttttaaaattattgattcaacttgttgcttgtaattggtgtgtttaggttttctatttcttctaggttcaatcttgttaggttgtctaggaatttgtttctgtttggttttccaatttgtgggtgtacagttgtttgtactagtctctaatgatcttttgtatatgtgggttatcagttgtaaggtctctctttttgtttctaattttatttatttgggacatttttcttggttagtttagctcgtggtttgttaattttgttatcttttcaaaaaaagttttaaaaattgatcttttgtaagttttagtctcaatttcatttatttctcctctgatctttgttatttctttccttgtactaattttgggtttggtttgttcttgttttcatttttgttcttgcactgttagattatttatttaaagtctttctactcttttgatgtgtttattgttataaacttttctcttagcactgtttttgctgtatctcataagttttgatatgttgtgcttccattttcataaatttttaaattttcttcttaatttctgtattgagtctttggttatacaggagcatgttgtattcatagagcttccaaaagtccctcttgttattgatttctagttttattccattgtgttcagaaaagatacttgatatgatttcacttcttttaaatttgtcgagacttattttgtggcctttgtgatctgtccttgaggatgttccatgtgctgatgaaaataatatgtattctgccactgtcagttgaaatgttctgtaaatgtctgctaggtccatttgagctaaaatgcagtataaactcaatgtttcgttgttgattttctttctagatggcctatccagtgatgagagtggggtccccaactattatggcattggggtctatctctccctttggattgaatactatttaatttatatatcaatgtgttccagtgttggatgcatatataactgttgtagcttcttgctgaattgattcctttatcattatatgatgatcctctttgtctctttttacagttttttcacttaaagtctgttttatctgatacaagtaaagctactcctgctcsctttttatttttatttgcatggagtatctttttctattcctttgctcttaatctgtatgtatccttagtagtgaagtgaatttcttatagaaagcatatagttggatcatgtttttgttttcttttgttttaaatcaattaagtcagtctatgtctttaagtggggaatttattctgttracattcaaggttattattgataagtcatgacttgcttctgtcgttttgttaactattttctggttattttgcatatcctttgttctttcttctcttattatttatcattgtggtttagtgattttctgtagtgataagttttgcttcttttctctttttttctgtgtatctgctctactagtgagtttgttgttgwtgttgttgttgttgtttgtttttgagatgagtttcactcttgttgcccaggctggartgcaatggcacgatctcagctcactgcaacctccacctccygggtacaagtgattctcctgcctcagcctcccaagtagctgggattacaggcatgtgccaccacacccagctaattttgtgtgttgagtagagacaggatttctccatgttagtcaggctggtcttgaactcccaacctcaggtgatctgcccaccttggactcccaaaattctgggattataggcgtaagccaccatgctcagcctctaccagtgagttttatacttttgtgtgttttcttagtagtgataatcattttttgcttccagatgcaggagtccctttagaatttcttgtaaaactgttctagtggtgatgaattccctgtttttacttctctgagaaacgttttatttcttcctcatttctaaaggatatatttgctggatatagtatccttgactgacagtttttttccttcagtactttgaatgtagctttctgttctttcctggtctataagkttctgctgaaagtcttctgttagtctaatggggattcccttaaatgtactgtgacacatttctcttgttgtttttagaattcttgctttgtctttgactttgacaattgaactataatgtgcatcagggcttgaatctattcgggaacctttgagtttcctggatctgtatrtacacatctctatccagacttgtgaaattttcagctattagataattaaattaggttttttttttaatacatcttttccttctggaactgccataatatgaaaatttgttcacttaatggtgtcctataagtcttgtagtcttttttaaaaactctttttctttcttatttttttttctctctagctaagtaattttaaataacctatttttaggttcagagattgttttctatacttaagtctgttcttgaagctgcctattgtattttttattttattaattgaattattttttataatatctatctctgttgaatttctaatttatataataaattctttttctgattttgttgaattgtctatctgtattttcttgtatcttgttgagtttcttaagagtactagtttgtattccttttctggcaattcattgattttcttgtcattagggtttgttactagggagttattttgttcctttggcattgacatatttctttgctttttcatatttcttgtgtttctacatcaatgtctatgcatttggtggaaaaattgcctcttccagactttctagagtggcttttgcagagaaagactttcacctgtagttggatcttagtgtgctaattaggaaaagtgtggtgactttgtttccaggtaggttcagtggtatagtatctatgcagtttcttcagctgcattcagtgtcaacagtaactgtggatgcctgaatgacttaggctgtaaaagtgtatggtggtgctcatcatcactggccatcagagaaatgcaaatcaaaaccacaatgagataccatcttacaccagttagaatggcgatcattaaaaagtcaggaaacaacaggtgctggagaggatgtggagaaataggaacacttttacactgttggtgggaatgtaaactagttcaaccattgtggaagtcagtgtggcaattcctcagggatctagagtyagaaataccatttgacccagccatcccattactgggtatatactcaaaggattataaatcatgctgctataaagacacatgcacatgtatgtttattgcggcactattcacaatatcaaagacttggaaccaacccatatatccaacaatgatagactggattaagaaaatgtgacacatatacaccatggaatactatgcagccataaaaaaggatgagttcatgtcctttgtaggggcatggatgaagctggaaaccatcattctcagcaaattattgcaaggacaaaaaaccaaacaccgcgtgttctcactcataggtgggaattgaacaatgagaacacatggacacaggaaggggaacatcacacaccggggcctgttgtggggtgggggcagggggagggatagcattaggagatatacctaatgtaaatgacgagttaatgggtgccgcacagtaacatggcacatgtatacatatgtaataaacctgcayattgtgcacatgtaccctaaaacttaaagtataattaaaaaaaaaggggtatggtagtggcagtgacaacataggttgttaatgtcctcagtggcagggcttttggggtcctcctattctgattttcctcacaatggggataattaaacaagwggatccctcttacatggcctacaagcagttccattgctttgagttccagggattggtacttgaagtggctatggagtcagggtgctaatatcagagtttcacaagcctattgtggctcttgggtcctggggtacaggttcactctctgtagctgggtcaaatataggtttcccacagagccagaatctatgactgttaggcascccctaccagctttgattcagtgggtcaggttgtagctgtgattctacccctggggaataggatacagccctggctcarctctgggaaagaagcagagttttaggggtttgagcacagcatgcatggtacagctataatttaggagcctaagccaatagggttcagtggcagcttaggtccctgagaatgaagaactatgtagtggtaaatttagaccttggaatggtggggcatatctgtatcccagactccatgtggccaggcgcagtggcagcaagtaccctagaatgactgagcatgggtattgtttgggtcctggagggcagggagtagcacagtgatgagtccactccccaggaaacagcaggtcttagcagttcagactctagtgggctagtccagcttcaggaaagcagggtactagattgtccagtagggtagactgtcttaggtcatgttctactctgtttccttgggacacaagatactacatcagctcagccctgggatgcacagttgtttaacttgaccaaggcaatgattccccaaggggcaatgtgacactttaactcaggcatgactgttctgtgtggcccaggcaccatttacctgggatacagggtcctaccaaagcactatttccttgggagatactgtgccattttggctcagacccctagaagcagtgtacagttgcagcggagagaagcagatggagctgttctgccaaagcactgtttccccaggagggaatgtattgcttcatctctagcacaagagggcaggtgaagggagagggcaggtgaaggtgagggagggcaggtagagcagttttcactgtttggctccatggggaaaggcattaacagctgctggcagcttggctgtggccactggtttggggtggtttggaggcagcttagccttayggaggcaggggtgtcaagcctgctcaccctcagagaaaatcacacttcagcagtagttccagttctaagatgatatagcacagttgccatgtgggctacagggaatagagcacagtattagttccttctctgaggtgagtgtggctgtgtggcctgtaggcagctccctcagctggacttagtgccagtgaagactacaaggactccagtagtgaggactgtgggtgtccaaggtgttggtggaggctactggaatcctcttgcttgcctttttcctatagggaaagtttcctctgggtttctggctcatctcagctggggatagggtggtggagttgtgatgtttccttccattctctttgtggctgtcctgagtttctgtgctcaccagggtttctgttactcctttgatgtattctrgcactctccttcagttatgtacattaaagtgtagttgtttattcattgttttggctgtcactgtggaagggatgagtgctggagtttctagtgagccatcttgctgatgttgctcccctaaacttaagtttgmaaagcatttagagcaactcaggttatcttgtgcaatttatgaatttatgaatgccataaaagaataatgtctacttaaatacacttttgtatttacttgttaaatgtattcatcaatattttaaaataactttacacatttaacaattttactttctttgtaaacacttcgaatacttggcagtacaagctcacaaccttaacaagcaaaacctttctaagctttgaagccatgttttgaatcaaatatactagactcataaagaataaattcagttatttaaacatctcagtactacttaaaaacatcaaattctgttaaactttttaacctaaaattagaagtcagtaatcaattgtacttctaattgcaggggcaatctgtcagattcttaaatatgataaatcctcttaaacatcacaaatacttgatacaaaattctcagattgttccattacctaaactcaaccaaaaagtatgaatataatggatttcattgaccatacaatctattttttatctgtctcagggttgaaaaatcccttgcttactaaaggaacagtgataaaatctcaggtggtttaaggttaggatcctgataacctgaggttatttatcactgtaaagttatgaagtcaaaaatttatgttcataatatggtcacttcttcagagatctctgattgcattgaggcctgggaaatagatatataagtaaatgaatatctattcatttacacacacacacacacacacacacacacacacacacacacatgaataagttttccttagctaaaaattgacaccctgaaatttttcatacttatttagaatgggggctgtcttctcaattctatgtctgctacttactacctgcataacttttggccatttgcttaacttctctaagtctcagtttcctcacctataaagtagagataatgatcataatctactatgtaggattgttatgaaaatcatatgaaaaaatatatttaaactgcttaggactatgcctggcatctactaagagctcaaaaattatcattttaccattattatccattatgctgccttcaagttttcactcgaataactatggatgtcttaaacttaattaacctaaatttgataactttcatgatatgtgaaaaatgggagaggcccattaaattaaaggtccctgcatgctgaacaagcacaatgaaccagttagcactgtggcagagggcagaaaaggtttgaggataaggcttgtctgtggattgggtttgacagaactaacttggcatttaaggagtatgttgatgggcagccattcaattaagtggttaacttggaaagtgggagyaggatagtcagtcacacattgtaacagggtagcccaagaggtgggtagaattctaggatggggaatccagtatctacacacatggtacagaaaaatgaatgttggacaagtagtaagcatcagaaaaggtttccaaggtagtcagacctatttctttggatgggttcaagtatgtaggtgggaggaagaataaagaagccagcaagggccagagtttattcctagagggatttgggtcctgggaaggtgaccaagggtgccaggttgaagcccaggtaagaaaagaacattgctgagcatctactgttgcctgacatatgctcccattttaaaaatattctctatattatctcatttctctctcatagactcacaatgtaaatcttattgtatttattttataggtgacaaaagacatgattaagtaaacgtttccaaggtcacacgtccagtaagtggtcaagccaaatcaaacacagaccttcctatttcagaggtcatgatcattycatgacaacaccctgcctcagaggtgacttgatgttgagcttagagcattgacctagctagtcttaaatctctcctgccatatgccatgattagtccttagaagaggataggttgagactgcagatgggaggtgggtctaggatcgcaactcttgggagaggaggcccgcagaagctgggagagggtggagactaatcagcaagagtgacagatgcatagtctccttcttctgtccctgtcctggttacttgttctaaacaggactctagttctccgttagaagtagaaagtagataaaggtaagctaatgactacatatggcaatgattcttaacctcttaatgtgatgaaagatgtgaggttttctagaaaaatgtgcacagaccagtagttataccattccacattcagtttcagagagttcccagagctcttgaaattaatgaaggatttggtcactagcccaagagactctttagaccaagaaaatcttcagacctaggatgcacacagccttttcagaactgttttctttgaggagtgttggcgtgattgccgaccgatgctgctgctgctgatagcagcaaacatgtatttagagtttaataaatactagcctttattttattaaattattttaaaattctaacgacagccctacaatgtaggtattaccattagccttgtctagatagatgaggaaatgactcagagaggttcaatatcatgccccaggttacacaactcataagtaggggtgtgctcaatacagttcaataatttcataatttaaaaaacaagaggttttgatctggtgtagttggggagagtggacaatttttaacacataccatataaatagtgatattttatttttactataggcacttgcttaggagtgacaaatttcacccaccacattttaaaatgccatagcgggaagccctgctgtttaccttgctgttgcactttctatacatcgaagtttatctaaatattgtaaagggctttgctgttgaaacatactctctgaaatgggaggcacacattagctgggttatatttctttccattagcaaattataagattactacttagaattttaaacagtgcttgttccttcaaaggactttacagctatcagccagttaagctttctcagtctcctgtggagtcagtcagtgtgaatttcccatcctgtaggccactatttagtactctggatataccaggaccatcagatagaggcagcttggatggtttgttggtttgtgtacttctgaatagtcttcattcagagagaatggtaaacccatctgtagaagaagggcaggccctttgtcgggagaacacacaaagcaacaaaggaacctgttgaaggaaacaaggctgcacagcaaatccacagctccctgggacggcgctgagtgcttacttttgtaagactgctactaaatattttcctgacatgacagaaaacaacttgcccaactttacatgtgtgtctttggagagagccataggtggttatcagaaaaagcactcaatagtttcaaatctttcttcctcccagtaaaatcatctggagggaaaagttgtatccttttgctttcatccactttggttctgcattgcaggtttctttatgaagctcctggtagtgtgatctctcactctctctctctctctctctcyccctctccctctctccctgccttgttcccctcctccaaaaacaaaaacagacaaaaaacccaagttggttggcatgctaccctacaagttttttcatcattcagagaccttgaagmtcaaatctaagaacgcaagagttatagtcatgttgcaggagtgtccggtgcacaggaaagtaaataataaataatctttattttttgaacggggaacaatttaagcatctttgtctatgaactcaaaggcaaaactcttctagacttttgtgagttgttgccagtccttggttatgttactaccctataattcagggtttyctgaaaggagttaagcaattttaaggccatcataaattttattattatttcctgagatgtattacttgggttctcagggtgatcattaaatttgtattctctttgaatcattctgattgaggatttgtctcaataaatgatcattattctttattttcaaaaggaaaattgccgttatgggctaatgactgaggaaaatgaatttagagaataatgtgggattatttttgaggcataattttctgttcaaaagccaggaagcaaaactggccagcttataaaaatgcagagagtaatgtatttttgctccttgagaatttttctgggtagaagaattaaagagaagaaaaggagaaggaaagaaggagggggagcaaaagaaggaaagatatcccactgatgtgaaatatctaattaccctttccccaaagggtctcacagaaagtacgtatttattggaaccaaaatgaattacaggattatagagccctgagctggacaacttatgttagggaattaactttctgctacaagtttttaatatgtgtgaagctgtttgcctacaaatgttttttgcaacaagcgctcatgagatatcaaaagaaatgaaagcatttcctcatagcatggaatttctaccacaaacaaaacaaagcaggcttatggcaaactaaagtcccattcaggagtgtgtcacccttagggacacacagcaggcaaaacatgcaattcctactgaattcatactgaagtatgatcttgtaaattgtattcacctgctcatattacagaggtttctttttatcagttgaactccatttgtattttcctcagtatattccttttaaaaatataataggagctgggcacagtggctcacacttgtaatttcaatcctttgggagactgaggcaggaggatcatttgagtccagaagttcaagaccaacctgggcaacaaagcaagacctcgtctctacaaaaaataaataaataaataaataaatacattcaaaaaataaaaaatctgggtatggtggtgtgtgcctatagttctagctactcaggaggctgaggtgggaggatcacttgagcatgggaggtcaaggctacattgagccatgattgtgccattgcactctagcttaagtgacagagcaagactccatttcagaaaaaaataaacaaatacagtcagacatttagcatcctgacttacacgttaaatatgtcaccattcctgggccccttccttatttatacagagtcctttataaacaggctggaacttggaaagtatcattatatacctaataaacttactatttttaaaaatgatcatgtttagtgctgaaaaagttgtggtgacagtgttatgttattagacttctggtagcactataggttggtgagttccttttgctgagtagtttgatagtagaragcctgattaggagagataatcatgggagacaggagttctcggagacttttcctaaggtagtcatgtaacagaagcagaacagaatattcactagagtgccaccataaakctctctatagtttcactgtgaaggcaatgttaaaatatgcaaaacgggttctaatgtaacttattataatgcttctgatataacgagaaaaaggaagatacaaaatggcaggcatgcaagagctgcagatatgcaagaatgagctgccctatggataaggacagaaaggcaagaaccacagatggaaacgggtttacatgggattccttttcttcctaaaaatcatgttctcagtgctcctattgtgccatctttttagaaaatttaattaagagtaaggtaacaaatgtagacatcaacgaggaaatgctccaaggggtccatgttgacaatgtctggggcatcaccaggagaataggctaagtgactatttcccaagcagttctcctggggtacactcatttaccatggtccatggtcttacccatgggggactctctcttcaagacggaattacattacccaagtttgtgagacgcggtaacctagaaggcccctttgtgattttacaaccagcagttggcccactgcacagactagtgggactattgcattccatcctctaagcaggcctgaggtccatgggaagccagagcatcagatagttgtgtgtttagcaagagaagagaacaaaaggaattgagtgatgctatgttttcatttgacacaacatacaatatgactgtcagactacagatagcttcatgctgctcagttctcatgataaggatagccttgcctgtggaactgaaactccaaggccttagctaccttccacctcctgcatctctttccacagtaggggtgccgtgtycctacattagaatacttgaaggccattaactaaaggcttcctttccctagacagagcttaaatggccactgccaacatctctttgtagcttttctttgtatatttttctacaactgaccactttttctacccataaacatgttaatattctctatcagttgaaagtcaagtcttgctgacctgtttttttttctttgtgtgtttaaatacctctgtattgatccattatgcatataacagagcaatattagttttctcatttctgagttctgtgggcatgcactttactgttgctcatacatgctgaaaatagtaggtgacagaattgagcagcaaggtgaatttatatgtcagaccaagaaggaaaatggaagctaaggtaagtcaacagattgtgttgtgcactatggtggattatttctaggtacccacaatatttattgcaagtctttataaggaaaaattaagaatcaaatcaaagtacttaatttgttcttttgtcagaatccacactaaatggtaaagcagggtattgagggccccttgggaaccgagaaaaagagctcaagaacagacattcctcttcgttggtgtcagacatgaatatttgaagtcatgtcaattcctataaagggagaagttggatgagacaacttgcagtgatggtggcccttgcttaaactctggctccctattatttatcttggcacttctggggtggctgtggagtctagaaagcatgtcttctttttagtgaactatcttccatctttgtaagagtggtcccttgggccttagaaacatatttggctactacatggctccgtggcaaaagttgtttgaattagagttagacaccgaatccaagcgtgccccatctcccaccccaaggtctcactttctgaaatttggaattcagagatatgcagtcattccttgcatgtggctagaactatgacaggtaaacctgagatctgtggacaaccatatttccctatgagaattgagaagcagagatagaagggggctgtattccctgagttcctgcccaccttctggttcccggcactggggggaactggctgcatctttgcctctgagtccttgagacactcttgggtccttctaatgatgccccttcaattttaacctagcctgatttggtttctgttacttagaactgaagagacttactaatacatyctgtacttcaagccaataacacatgaataattgtcctcaaaaattagaattgatcttccacagggggttaggagatttgggtgaaataggtattatctttaatttaagtgtgttaggggtatttcaaaatcttcattaaattttccaaatccttcctgttgtgttgccagaatctttccttaggtaagagaccaatctgaggttggttccttgggattttgttaagctgggaaatcccttcagaatgacagaagccaggctatactacagtattaaaaggccaaagactgaaacattctaaaatgtagataattaagtttctcagaagcctcctcttccactcgcctgctatcccactctgctcctcaaactcacgaattttcaaaggtatttgaagctgaaatgggcctttgagttgttacttgatattttcatgcatgtcctgagattacggcctggagcttygctttgagaataatagtcagaaacagctatttgattgtgtctttagactcctaagtaagttaacaggggagttaatgtcggtatgaaacagtttagctaaaatgtatcgccatatccttattgaagaccatttactactcattcagaaatatgttacaaagagagtatattgtcaatgaatcccactcatgaattgattggaaaatataatttattcctagataaaaagggagctctgattgtatgagaaagggcttcttcaggctttctgattcttattggttgtttcaaaatgtggaatttaataaggcacaaacaactaggaagagaatagggagtgacaggagagcagtaagtgtaatatacagcaagagaggggaatctatcaagcaggaacactttcttggtagagagagaaagcattgccttgtaaaatgggatagctttgaaggaatttcaagtctttatttttggccattcaactgtagactagggtttcacaggactcatgttaggtttagaggttatgaaatactgttttccaaatggaaatatatggcttgcaatctcaaagaaaaagaaaacagagggaaaggaatgcttctggccaaggcatcaataatcctgttattctgagatgtgtaaagatcacccacaggcagtagctcattctgctgcctttccaaccttcttatgtttttatttaaaaaccttcaattctattcagatatgtcataacaagctatgtcttggtgagcacacaggtttgtcaytgagaaaggtcatataagacatgacttataagctacctctactgtgctctgcttttctccatctttgggaatctctgttttagttaggagagactaagttatgctgcagtaacaaatgagtccccagatcacagtggcctatcacaaagaaaggtttagttcttgctaatggtacatgcccaaaaaaagttgtcagggggctctgcttattgtagtcattcagatagacccaggctgagggagccactaacatcctctagttaccccagagcatgtgaacttttgggggasaaagattggagaattaaacatagttttttctttgacttaagaaatgaaacatgttactttttctcgtgccccactaagtagagctrgtcacatgatcctgcccactcataagaggctgagatgtgcaggagtctctatgcttggggctaaaggagaactggatgaaacaagtagtatctgtaatagtatctgccatagttaaaccttctgaagactttgttcctgcataaaggctgccctgatcaattcagctcacagccataacatcttcttttgaagatctgttaacacttgtgtgtaccattcatttggcccttagccttcactgtctttgatatgtaaatgtctacttaagcatgtatgtgaatatgaatacatatttgcatctttgtgatgtctcctatatttgcttatgagtacactgaaaacasacaagctatattttttgcattacccatagtgctttccatattcagttagtgtgtaacaaatgtastttatgggtaaacctgtgttcaaagggcaggaaatagataataagcaaatttgctgattttatttaatttattccacaaatacatagcagcttccttatgggagtgggtgttcataacaaattaactaagagtcctcacaaccttcctctggtcattaaaaagactattgtaggctcatgttgctgagggtcatgcatactttgtgatcgaatacattcaatttcctggcttctgctcatgtaggaggaaaagaaaaggaggcaaactgaagagaagggactcaatagttgaggcaaacaatttcaacagtcaatggggaaagaaaagaggaaaaatcacaggaacccagttattcatcaagcatgggaagggagactgcaataatggatgacttggtgcttgtgtgcaagaatcacagcctggatggtaagataattatatctcctgataattgtgagagagagcactaaatatgaaaagcagcttgtttcatctgtagacttgcccataggcaaagctggaaaaaccctctgggttaggtacctattgctgcataacaaattatgccaaaactcaactgcttaaaactgcagtaaacatttactatctcatgttattttggtgagttaggaatttgggacaggcttagtagagtggttctggctctatagtcatctgaaggcttgactggggctgtaagatccacttctaaggtaccacatgcctggcagcttgatggagagtattggtgggaggcctcagttcctccccatgtgggcctctccactggctgcttgagtaacttcatagaatggtgactggcttcctccagagacagccactcaagagagagaaaagggggaaagctttaaggactcatggctcttctaacctagccacagaagtcatacatttctgcagcatcttattgcttacacaggtcagccctcttccacatggaaaatgacttcacaagtgtgaataccaagaggcaaaactttaggggctgggtagcacatcctctacactttttgtggaaggagactcagattaaaaataagtatcaagtacattccttccagagaaaataaagagaagaagttatasagagaggaaccctcagtgtatttgtggcaggagtttggagcctttgggaacagatgacaggcatctctgattcagggcctccatctgagcagacttctttcctacttgttgaatgcttccccgagtcacttcttagctactgctagaacaggaggattttgaccatttaaaaaaaaatctacaattgtgtgcaaaagaaatcttatctccctctaagtaaaccccatctgtggaaaatttaactgtcttgtctacatactctacttctctaagcagcagtagagctacttaagaagaaatagatgtttctcaagtgttaaccctgaaaagatgttgtgccctctctttgcttcagccttgtcacagccccccatttagggaaaaatgagaataagcatgcctatctcacagggagtcatgagccttaagtagcataacagatatgaaatgcctagcacagagcccaagacagagctggggcctaatacaaactggctcctgtctccatagagagtctcttgatatagactctcttcatactaagaggaatgaaatacatacaaacgattaaaatgaaaattcagactcttataagtaagtctgaatttaattacataatcttaaaataaactgaattttattaggcatgtctaacaaatcactacttttatctaaataagtagttcatttttttcccaacagatattcctgcaacaatggacatgtctgatacatgtgctgaccagtacagtggccagtggcctcatatggctgttgaggacttgaaatggggctaatgggactgasaaaataaattttatttaattttaccttatttaaatttaaatagccacatataattagtggctaccacattcaacagcataggctaaaatgccaaatacctatgatttttttcaacgtcagacagaaatgggagaattttttagttttttggtcaacacatgcattccctcttaggtaccttatttatttattttgggggattctgatttgagcagttggtttgttgctactgagaaattttctcaaagccaacagatagatttattccctattttattttattatgatttatttctattttattgtgaactaaggcgattcagaagctgagcagtgtctctgtggttgtggatatgaagagctttgtagatagaagacagctggattcttacatgcatctaccctttatcctcatttccatagagttaatcgaatcttttagggttttgatgcattttcaaagggtgttttctaagttgtattaataagtgtcattatacttgtgggctatacactgcgttcctaagagtgtccactaatatcccctgaaacaatgttaaaaatgatatgtgagttgctgaagatgatttaccktatcatgctcttgaataggttcttttgatagctttagaacgaaattcaaactgctgagaggttcaagtctttcaagtcaggacaacttaggctccaacctcatctgccacccctccttgccaatacagagccctgttccagaatatgccacaccatccaccttcttcctgaatctctggctttaccaatgcagtttcttctactggctyctccttttcttgatgaaggtattcatcccaaatctcagcccttctgtgaggcctcctcacccttctgcaatgagagacagcacaatgaagtgtttaaaaccatgggctctaaagttggacctcctgtgttaaaattccagctccaccacttaccgatagtaactttaggctggtttcttcacctgcctgtacctcagcttcttaatctgcaagatggtatgaatcatgggtctgtctctgctatggtttggctgtgtccccacccaaatctcatcttgaattgtacctaccataatccccacatgtcatgggakggasccagtgggtaggaggtaattgaatcatgggggcaggtttttcccatgctgttctcgtgattaagtctcatgagatctgatggttttataaagggcaattcttcttcacatgctctcttgcctgccaccatatgagatgtacctttgctcctccttcaccttctgccatgattatgaggtcttctcagccatgtggaactgtgagtccattaaacttctttttctttataaattatcccatctcgggtatttcttcatagcagtatgaaaatggactaatacagtctcataggcttgttgtgaagggaaatgagacaagtactcaatagatgtcagctgtaattattattctgtactcccttattcacacttttactgatagttttataatgatgatgttaatatctttattatgttctttgcattattgttgaatgtacatgtttctgtcctccacttccattatgagctgttataaacagaggataatacctatttcactactgtaacctcaatacctcacccagggaccatcaaagaggaggcactgtatgcatatttttaacaaatgaatgaaaatatgagtgcattaatttattccactaatgagcacccatcaagtgtttagtaaacctcagattgatgaatgataaggtgataaggcatactttaatacctattttcttaaaccctttcttttctgtgatatttaatgcataatggtttattagtcttctattactgtcataacaaactatgatraatttagtgacttaaaacaacacacatttattatctggcagtcagaagcccaatacatgtctcactgggctaaaatcgaggtatcagcagcgctgtgtttcttactggagactgcagaaaaaccaacttccaaactcgttcaggttattgacagaatttggttctttgtggttgtaggactgaagtccctattttcyttatgtctgttaggcagggctccacccttagctccctcaggcctctttctggtcctcacacagagcctcctacattttagaaccatcaatgattcatcttatctttttctttcttgtgtttggaatctgactttccctctgmagcatagctcctgcatyctcttctgctttctcactctgactgattcttccaccttccacttatgtttttacaacctcatgtgactagggtaggcatacccagataattcaagataaccttcctatgttaaagtcggttgactagtaaccttgatacatytgctaagtytyttcatggcagcacctaatytagtgtttaattggataaccagggacaggaatctttttttttttttttttgagagggagtttcactctgtcgcccargctggagtgcaatggtgcagtcttggctcactgcaacctctgcctcccgggttcaagcaattctgctgccttagcctcccaagtagctgggattacaggcactcaccaccatgcctggctaagttttgtatttttagtagagacagggggtttcaccatattggccaggctggtcttcaacttctgacctcaagtgacccacctgcctcagcctcccaaagtgctggtattacaggcgtgagccaccatgcccggcccagggatgggaatcctgcagggacatctttagaagtctgcctattgcagtggtcaattcatgactgtgtttaagctgtttgaaaaatccatcatattttggctgggtgcaatggcccatgactgtaatcccaagcactttgggaggcctaggcaagagaattccttgaggccaggagtttgagaccagcctgggcaacaaagtgagaccgcgtctctataaaaaaaatacaaaaattagctgggcatggtggtgcaaacctatagtcctagctagtacggatgatcacttgagcccaggagttcaaggctgcagtgaactatgatctcactgccgcactccagcctgggcaatagaacaagacactgtcttaaaaaacaaaaacaaaaacaaaaacaaaaaactccatatttttatttacctttcatctctatgagggcagggattatatctgttttatttaccaagttatattcagcccaatgcttatctcatggtagatattctataagcatttgttagacacattgaaattcctagacccagatatttgggtttgtttttgttttaatcattttattctaggttaccaaagtgatcaaaccggcctttttttttttttttttgagaccgagtcttggtctgttgcccagtgcagtggcgcgatctcagctcactgcaagctccacctcacgggttcacgccattctcctgcctcagcctccctagtagctgggactacacaaactagcttttttaaaaaaggattatatttattttggttcttactttgttttttggtctcctataactttgagtttactgcttgatcccttaccttttcttaaattttagtgtcatttcacttttttctcctaaaaaaactgggctggacctcttttggaactttgagtccttttgcagtgatttcaaggggaacatgagagactagactatcaatatcctatgatgatgatgatagcaatgatggtgatgttttggccagtgtgggctgctggttctcaatcggaggcgattttgcaggtgacatttggcaatgtcaggagacatttttggttgtcatggctactggagaggttactactggcatctagcaggatagaggccagggatgctgctcaacaccctacaatgcataggacagccctccataacaaagaattctgtagtccaaaatatcagtagtgcccaggctgagaaaccctgaagtaggctaactgctgtaatgagcttcgtcaaaacccagtagcttaactgaaaaaaaaaagaaagatatatgatatgatatatcatatgtatcatatatgatatgatatatcatatatatcatatatatcatatatgatatgatatgatatatcatatatctatatatatcatatatgatatgatatacatgtatatagatcatatatacatatatcatatatgcacatatagtatatatgtgtatatatgatatctgatatatatcacgtgcatcatatatacacatgatatagatgacgtgggtcatataaccttgataataggataaatggttcatatatacgcataatatgggcgaaatgtttcatatatacatgatatatgggtatatatgtttcatataaccataataaagacgcatatgtgtctcatatacacattatataatagatatgttgcttatatacccgatatatatgagacatatggatcatatatacctgatatatgtgatacatatgtatcatatatacatatatatgtacatatgtatcatatatatacatatgatgtatgtcatatatacatatgatgtatgtcatgtatacatatgatgtatgtcatgtatacatatgatgtatctcatgtatacatatgatgtatctcatgtatacatatgatgtatctcatgtatacatatgatgtatctcatgtataccatatatacatatgatgtatctcatgtataccatatgtatatatatcaggatatatcatatatatatcatatatcagatatatcatatatatatcatatatcagatatatcatatatatgtatctttttgtttttttgagatgtagtcccacttcttcaccatgctggagtgcaatggcacaatctcggctcactggaacctccgcctcccaggttcaagcaattctcctacctcagtctccccagtagctgggattacaggcacgtgccaccacacctggctaatttttgtagttttagtagagacagggtttcaccatgttggccaggctggtcttgagctcctgacctcaagtgatccacccacctcagcttcccaaagggctgggattacaggcatgagccaccgtgctcggcaaaaaaaaaaaaaaaaaaaaaaaaaaaaaaatcgtattcagaatccactgcaaatgtttctgaagggtggctctcctaggaggttcttaggtaggatccaggttctttccatcctgtagctctaaattctttaacaagtagccttcagggtgcctgagaagggaaaaggagagtgaggagtagagtctagaggatttctgtaggcccatccaggaaagggtgtacatcacttctgccacattccattgatcggaactcagtcatttggacccacgtaactccactgaagcttggaaatgcsgtctacctgtgtgcatgggtggaaatgcggtctacctgtgcacatgggtgaatactaataatctctgctagaaaaactgaaaacagcagcaaaacaatattaataccattaacatctaacatttattaagctcytctgtgcacgcatagtaatttacctgatatagctgagactcaaaaaggttgaataccttgcctaagtttatgaagaggtctatgaggagcccagagatgaacacaggtctgcttcgttccaaaaaacatgtgcttaaccactattcgatactcctattgggataggaattgaatactgctcttagtggggctttatttttatgaaatagaaacaaaagctgtaaataccacaaatgcagaatgttstagacttccagagccgctaaaacaattcttcctaaagagctggtgaaatcctttttagggaatatcaatatacagattgcattccaagtttttgtstggatcamagatgaatagacagggagagatgaatgtcctgggggaacactatcatggtgstttttaaatcatcctgttgcacttaggcattgcagcctgtgattatatatatttcagataagttttctgtagtccagagggattgctagccaaggtaatgagcactgstaggaatcttgacagcaaactgtaaatggtctcaatgccacagactttcaagaaactgggaccttcttgaagtgaatggctatttctgtcctatttaagtaattcattstcatctgtctccgattagtggtgagccttgtgtcatatgtgatagttataataaggcacttaccaaaacttccttttaagggtggaaggcattttgggtttgattgtcatsgagcaaggtagaagaaagaagccctcacttcataaaaggccacactggtagacaaagcaatatgaaggggtgtaatatgtgaacagagttcacaatcttcctttagaatgaaagtgcagcggtttcctggaatgttttaatcgagttttcagggtctgaaagctgaccatacatgtgatggttctgaatgctgctcccttcattatcggcctctgctttgaccatgttatagcacacaattctcagtgagttctctattttgtgccattgaaatgggaacttctaattttactgcttaaaagtgtgtttttctttttagtaaaatcaagcctgttcttttttcctgtctccttctctgtggaatactgcctttctctattcatttgcttacaagagaatctgcactatcatactggttagatctttaagtactcattaagtgttcattgcatacacaccatgtgtcaagcactgtgctaggcactgggctggagtagtgaccaagacaaacatggacctacctgatcataaggaagtcatgtgctcaggtgagcactagtactttttgccacaaataacaaaacaataacacccatagtaatactacctaacaattgttaagctcttataggctagtgatccagttgatttatttttccttttaagagatggaatcttaaaaagcccaggctggagtgtagaggcatgattatggctcactgcagccttgaactcctgggctcagttgatcctcctgcctcagcctcccaagtaactagaactacaggcatacatcaccatatccacctattttttcattttttgtagagatggagtcttgctttgttgcccaggctggtcttgaactcctggcctgaagtgatcctcccactttggcatcccaaagttgggattacaggcatgagccaccaggcccaggascagttgtgtttatattctgtctcagatgttgatgggcagaacaataaagaactctttatracatttattgcatgctaactctgtggcaagcactgggatgaaagctttccatgtattatctaatttaatcctcacaaacccttattgaaaagcttttgtcattatccccattttaaagatgaggaaactaaggtttatagggattagagggattatatcacctcacacagctgrtaagtagtgaagctgggctgtcaaatgctgtctgataccttagcttgtgctctaaactcagttgtacaaaatcatggaacatgatagggaggacactgattttcctttgatgtctaagtaaaatagtaaaaggtataccccagccattaaaccactctgagtaacttttttctattcttattattttaccatgagtctgtttttcatacatgcccttgaactattagaatcccccctcccaagatggcatccacacaatggtaaattacacctggccatttattgtatgtatgttcaggcttgttacacatcagaaagagacagacatgatccttgcctttatggatcttacaatktaaaggagaagagagtcaatcaatcacaagtgtgatgagtattataaaaaaggaagctgagtgctatggcaagtatatcacattgggaaggtaacctggttttggagtggggcatggttgtggataatctccatgtggagtgaagtacaatctcagaagccaagtatgagtaggcattagaccagtgaagaggaagtccaggatgttacatggttttgaggcctgagagagtacaatagggtccacgcactgaagaagttgtcaggtgggagcatagagaaggcagagtgtggtgggagataaagacagtgaggcaggcagggatggacaatgaaggccttgtggattgtgacaaggttttaggatcttatcatggaagcagtagtgagccactgaagatctctgggcagagtgggaacaggaaatatttggatctttaaaagatcactttgaagattatatttccaggggtcatttctgtggttcattacttaaaggagtttccccaagtgtgtagagcactggaaaccacaggaagatatgcaatgttctctcccgagcacgaagctcgttcttggtgttgcttcattgcaactgccatttgccattgatcattgtttttttcttcctttggggagattaagaggaagaggacacagtctgagtgatcttcattttaaaaaaaatctctttggctgcagtatgcaaaaggagttaaactgaggaaaactggaagccttggagtagggttattgccattctgctattctgagatttggtgaatcaaccccctttcccccccagatctgtgccttttgcaattttgaagacgtatgtcagggctcaccccacctctgtctagcaagaagcaactttatctgcctcgaatgcattaccattttggttgatggcytctgaacgttttccatcacagtcttctgcctctcctccatattctttgctaaataacatgttgggaatggtctccttgtcttccacatcaaataatttaactgaaacaccatcataattacaacttaatttctctcattcaaacagaggtgatgcatcttmtccccaaaataaaagcctccttaagcttacactctcacactccataacatgggtgtttacaaggttctttgcttttcttgcttgttgttacgtcttttgaattggattcaccctcattgtaactcattcatcttgtcagtcttaaattaagagttccttagggctggagagagggaaacatatatccttctaggctgtggaaagtacactacagaacactagaactttaagggagtcccacagggatacgacaatgaatgtagttttgtagtcactcttgaatatactcttggcccataacacatggaagatgatgttaagatagtatgtgagttctgaatgctttcagctgcctgtaacagaaaattaaagtgatagtgctgaaatcacagggatatttattactatgagaaaacaggaggtagwggatcccagggttagtttggcaactcagtaatatcataaaggacccagtgtctttcatactcaggctctttcctcttttggctattgcctcatggtcacaagacggcttctacagctctaagcacaaagcgttaacatgacagcatctaaaacaggaaagaagaggcatatgaagaaaaggctttctcctcttgcaactatgactttttaccaaaggtgaaaaatctttcatgagtccccccagtgtatgtccactcattggttagatctaggtcacatgcctactactgaataccaatcaatggcaaaagaacatagtatcgccatgattgggttagaccagtcattattcattatctaaggctaagcacatgctgcccgtcagaatttgggttttgttatcagagaagaaggagaatacattttgtcacatttggattaagaacagaaaaccataacacttctaaatggtgttctaagaggaataccatagtaggaaatttcagagatgaggaaatgaaagcaaatgagatgactgactccctagttccctggcacaaaagagatcttgagtaattccctgaacctccctagataggaagaggcacttagccatgtctgctcaccacaaatacttgtgtatggtaggcattggttgttcccttcctaagatccactttacatccattctttcctaacagaaatctgattttgtttggagcagcaatgctcagctcatatccagcttcccacactctcttacagttaggaaagactgtatgacccatttgtggctgggcagatgtatgtggaagtcactggatggaactttctggaaagcttttagaaagagactgacttggctggcatcctctttcccctttgcctttccccctcttcttgcctagggagaatgtgtcaaacttggagatccagcagccgtctatgacaatgaaagtgaaagcctcactgaaggacagcagaggaaaaaaaaaaaaaaaaaatagaagtaggctggggcattcatgacaccatgagataccagctcagtgtcagattataccttcagacatcttgttgcatgaaaaacaaaacaaaatatgcacacatgcatatccggaaaagaaagctttctgtgtttaaatcactgttgggctgttggttagctagattgcaattaatgcatctgaaagcaatcccaagtgatacaccttccaaagctaaaaacactgaataagacagtgaagatgcatttaagtattactaagtgccaaaggaaatgtaggaagctttgtatgagaaaagttagggaaagagaggaagtgaaaaatacaattggtctgatgtggccatgaaatgtcctggtgttggaacactttgagcttactctatcagtgttaccatatgcttgtgggatatgatacccaggtggccagatgatttggaggaaccacaacccaagaagtttacattctagtcccactggtgaatctgaacatttacacttccttcaacctgggtattatgttttaggcatttggatattatgcttacttttgtttggtgtttacggtttttcacagtaaggtaatcaggactcaaattaagttttacatgaagacatctttgcagtgttactaaggacaccaaagggactatgtttaacaaatcttgggaaaaatcaggtgtttttgtgtatgtggaacatttaaatacattgcagttgaatgttaatgcaaaaaaataaagctttattgttggtgattacactgcaaagaaaaagagtacttatgtttctttcaggatttgcaggtttactaactagcggatcattagataaaagatgaaatgaagcagagatcacaactgccattaagtcagctggcactttatcttaaaggcagaattgcactaaaatacaccagatatcctcaaatacaaaggtgaggtttgcttccccctgaatttattatccctcagaagagacgaccttgctttatatttgggtcctttcaaatactgctttaggaagtcacagtgggctgaagtggcttcacccaaggtttgttttgggtgctcgtgaaggtcatctgctaggatccataaaagaggagcagggaaattgaacacagttagtcatgattccaggggctatgacttcacaattccaactattggatgttgttccaaacagcgattttgaaaagtctatttaaaaagcaatacaagagacaaatacatcatagacatcaaaatatatacctgttcaaagaaatatttttatttagaagaaaaagctgctaatattatataaataggtacttgtgccttcagagacaactttcagaaacaccatcatacatgattcaaggagtgtcctgttttgaaccaagggaagaaaactcagttggagttttgtggaaaactctggaaaactcagttggagggctaaaaaggaggctcttatatggtggagatgctcacatcagaatttgaataaaccatgtgttgagatgctcacataagaatttgagtaaagtacatgtttttaagtatccaattaaattaatgaaataaaaagtataggtagatatttaactatgtgtttcatatccctatatgtttatatgtataagctgtccattctgccttttgaaatttgtttaatatttttactgaaaaaatggaatatttctttttttgaaaaaatcttratttttaggggatagggtctcactatgctgcttaggcttgtctcaaactcctggtttcaagcagccttcccactttggcctcccaaagtactgagattacagaggaatatttctttttttcaagactgccttatatttggcattagtaactactcttttcagtttattctcactatatcctttcttgatacattaaattttaatataatatacaaagttttaagtgcctaaaagagttctagagcgagtgatggaatgacatatggcagctcatgaaaaaatattacatacttcataaagagacatgcagttaggtgccagactgatgaagaaagttgttcatctttggatttgggtttgggtttaatacttgcatttgggtttttatttgggtttaatatttgtattagtcagggttctccagagaaacagaatcagtaggatgtgtgtatccatatgtatagaaagagatttattatgagaagttggctcttgtgactatggaggctggcaagtccccagatctggcattggcaagctagggacccaggagacccaatggtgtagtttctgtccaatgatcaacaggcttgagacccaggaagagccagtgtttcagttagagtccaaaggcaggacacaatcagtgtcccagctgaagactatcaggtaagaggagtttcctctttcttgcatgagggtcagcttttttttgtcctaatcaagccttcagctgattggatgaagtccacacacattagggagggcaattgctttactgcatctgttgatttaaatattaaaagtgtgtccaaagcaccctcacagccatactcggaataaagttcgaccaaatatctgggcacctcatggcccagtcaagttgatacataaaatttatcatcgtgacacttatagaaatgtggactttgctttttttcttttttcaggatttatatcaaggctactttcaaaaaatatgtataaaatattacaagtttaactataccatagaaagactcagtactggcttgttttattttgattttttaaattgaacttgtaaggcaattcttgagggaacttccctgaatataataatctgtctatattgttgatagactgcattaatggggtctatgtgacatgataaagttctgtggggctggcatcttttgttttttgagaaagactttatgacataaatgagtgatcttaaatataattgagttgcaccttgtgtgcattgaacttttgccaatttaaccacacagaattggccaaaaaagtgagagtaggaagtactgatgtaaataatataggtcattctgttagacgttcccctcaatgaatatatgcctcttagaaaatgtgasatgggttctgggagtcattctcattttcctgaacctcttagtgtgagcatcttagtgctgagtgagattccagtgttgacattttctgttatatatgaaaaaatatatgcctagtaaattcacaccaatgacttcatctgatccttgatcaaagaaggatctgttctaatgctagaggaaagcctctattggacctcctgagaatctgtaccatattttattctgtgggggaattaaagagatttccaagagactttctaagctctgacttaaaarctatcttcaatttaagatgccactcagctatctttggtctgggattgtggckttcttaacagtaaatgttaactactaatgttttcaagagcattataattttaggtttgctcttttaaaagagtatttctcctccctcctcctggagatgatctggaatgcaaatgtgagctttcctttgtgtatgtgtgtatatgggagtgagtgtaaaaggtttctttgaaaccatccctgtgggtaagaaaggcatctagccactctcttataggtatgtggggacattcacttagctgtgtgccttataccagggtttactgaaaaataccaataaggtatactgaataagatgctattcaaagtaatgagtaggttatataaattctgcttagagaaaagaaatttataagataaagacacctcatctgaaagtgtgaaagccttcagtatagcagctggtgttctgggtcagctgaggagaggagctttataaaggaattcaytggacctggttggccataggacatggcaggtgtgcatctactttggacaggcacctggctctggataaacaagtggtgagcacaatacctttttgtcttcatggtgttttaataagtgtgtttgggaaggaggtagggatgggcaacaagcaaataaagaagaaagtaatgggatgcaatgagagctattaacaaaataaaagattaatgtaatggagtgagttggtgggaatgaggagtctgctttagactggatagtcagggaaggcctctctgaagagataacattagagctgagaccttagtgatttaaagatgcagagcatgagagagagagagagagagagagagagagagagagagagagagaagtgcasacacaaaggccctaacatggaaatggcaacaaagtaccacccactttattattagttgcacctgtgcccaataccttccagtgtagaacactgataaaggtaggtactttagattggatagtcagcgaaggcctctctgaagagataagattagagctggcagaggtcttaaatgggacttyctaaatgccccctcaagcaaatagcatgcttaagaattctgaatgggggcctgtgaggggatggggaagaatgaaagtgttgagataaaaacaagaatccctgacatcgcctgggctcatggatgctattgcctcaaattagaaagaaggcaggaaagagggaaggaaatagttagcctgacctgagagattagagttttttcaacttagaagagaagaagtagaagtgggggaagtcacgtttattgtatagtgaccatgccacttagtaaataagactccatatgcttgaatttgatcaattacattaggaattgctccttggagagacatgggatatagggagagagagagaaagcatggcaagcctattttctacctattttcatacctattttaagggtgaagactccaagtgcataggtaagaaatttgcccaacaggtaaatggcagaaatggcatttagaagcaggtctgtttgataccaaagtaaatcagactgctctttttagagatcagatcggaatcaatcaatttttcattctcatgctctgaaagaatttacttatcttccaaagtaaaaacctcacttactctgttggatcggagctaattattttcatggtttcatttagatatttggctttatttttgaaatcataataattttatatatatatatatatawatatttcatttttgtattaacaaaagtcctgtagggaaatgacaattttattctctttgggttgagaggtagatgtctcattgttcagtctgttcctatggaaagaattgacaacaatcctaaatggtataatcacacatctacgttggtacacggaagggccaaaagccaaatagtattccttgtcaaatttctttgctttcattctcattctctctgtctctccctctctcccttctcttccctttcttcccagtctcttagcaaatatctacttcttgttcttcccttatataaaaggttaacatgtgaaaatctagttataattacatggttttccctttcaggaaatggttttgcaactattgataaaaatattcagtctgcatggataactatagtaaatatactttaaaaggaatgtattttctgaaatagaggctcataatgttatatccaaatttataactgattacctattcctttggtttcaaatctatgtttgtccctagttttcaatttcaattttaaagtgtttagtaacttctcaagtatgtagacatggaattgggtggtatttgggagtaacatctacttaaggtcagcttgatgagctttcttggaaaaaaaatccattatatacaaaattttaactcataacaataaaaaatagctaccagtttgaatgcttaccacctgctagacattgtgtatattttacaaagattacctcatttcatctttataacaatatggtgaggtaartatctatattcttatttttcagataaggaaatcaaagctcaggaaagttaaatgacttactctaggttgtattcaaattaagtgccagaggctggatttgaacccatatctgtctgactccaaagcctggacctccaattttctgaaaacactgagttgaaatcttcaggggttgaagggtggccatctttgaagttttgggcatgggttgaaagaatgtgctgtaactctagtcatcatcttgcaaagtgataaaacctacagctgagatctgagacctggagccatgactttccaaaagtctaaaaatctccttttagttaaaattgcaaaaaaattatcttaaaaagtacaatttgatagtaaagttctcaatagtttctaaatgaaaacccctgtaaatgtagaagaactgtgcttaaggcccaggagggcatagaaatgaaaggtagaaataaaagagtttcaacttaaaggaaataaaagaaagctaaaccatcttatgaaaaataattggaagcagatttcaataaaggaagagggatggaaaatagactaatgccaaaggggaactgaagacaatgatgtctggattcagtcatttgggagctgcctagaggccacagccattggcactccataaatttgtgatggtatgcagcaataagtaggaagtgcaaactaggggaaagaggaaaaggaagtgactgagttgcattgcaccataaattcaggagtaacatattctctctacatatgtcaaggataaaattgtgcttcaagttctttatttcatttggcatactttattcccataaagaaataccctggagggagttcatayggggaccaaaaaaaatgagtgtatcacagaaatgtcgactaataggaaaattcatttgactttccttcttcctgtggttttaccacaggcagaaatttcaaggtaaggaagaagaaaagaagaaagggaggaaggaaaggagaagggacggaaaaggattccagtttctgaatttttgtggcatcctactgtaagtggcagtaaaaggggcttgtgggtgtattttccaagataagaatgaatggataacatgagttcatgtgctttcctgggagagttgatagggatgctttttttggaaaaggggatctcctcatttgatagccctgtgatttgagcctgatgtgctgttaaggcttgggaaaggtagccccagtcaggggtccaatcttctgcaatgtgatccaagcataaagaagtgcttctgtgtgcagtggattcaccatatgcccacttaggaacccagcatcaggtgtagatcttcaccatgcctaaaatgtgcaagcaacagctgttcagaggtaccctaactggaaatgccatcttggaaagaaaaggtgcaggttgtcatattcttctctacaggattttaaagagcaatgtgtttgtgggtctgatgaaacaagagttagattaaaatgtagcaccctattgagtatctgctctggaccagaccctgtggatgatgcttttgcttatgaaataaggttatcagccaggctcattggctcatgcctttaatcctggcactttgggaggccaaggtgggtggatcacctgaggtcaggagttcaagaccagcctggccaatatggtgaaaccttgtttctactaaaaatacaaaaattagctgggctttgtggtgcatacctgtaatcccagctactcgggagcctgaggcaggagaattgcttgaacctgggaggcggaggttgcagtgagctgagatcatgccactgcactccaggctgggcgacagagcaagactccatctcaaagaaaaaaaaaaagaaagattatgttacttaatcttaacaatgacaaatacatccattaatgcatatgtccaagttatgaaatgtgaatattaaaacagtggaataagccctgttggagggtttacagctttgcacttcatcacctacctgataaaaactcagaggtggagatttgctagtttcttaaagaagaggttgtttgaataccctaatatctgtaggtggacttttctttgcttccttctttattctaactcaactgattttctcaaatattcactgtcagtcttgaatacacaaagcaatgtaacttgcaccctacaggtgattaaagtgatcttcaatggtaagtttgactatatgcaacatttaccttaggctccggctttagaactcaaatcctctcccttaggatatgactttgctatatttgtgtataggttatttagatccttgggaatgtcttgaagtttgtgtttcctacatacctaaatgtgtttctaactcctacattctctcttattgtttcacatatgctcttgctttgtggtayatcttttttagagacagrtatcatttacaaatatataatacattaggcagaagggtgataaccttttaatttagcttcaggttttaaaattttatgtattgccttaagaatagggcatgctgtattatgtagtgttgctctctaacaatgtagctaagctgttaaagacaagcagagccctcagattccagctgaggttcagtccacgtttttctgggcaatctatctatatagaaaaggaataaagccgtaagtgcttatgactttcttaataatcttatgcaagaggcttatcatacaagttacaaggttttcttttatttttctctgatacctttgtttagatatgttgccaatggtttaaaactgcattactatgtatcagccattacctcttatgtatttgacactgacagacattttcactccaatgttttcatataaatttattaattactcaagcagtctttgaggttgtcccagacatcgacctgtgagttaatggtgaaatttcatttacagcaggctgagagctcttgaaaatttatgggatgatcaagtttatttctggggtatgtgtgtttatgacatgtaaaggtaactgaagtctgcatatgaaataatcagcatcagaattggaggatatttgtataacctaaataaattctggggccccatgtggttcaatcttaagatagcatcgcaagtgaaataattaaaaaataawtctaaattttatttttacctctccaagaattttgaaaactattttatgcattacacatggcaactgtccttaaaattccctgttatcttttttcttcctggtgatctttctctctgtgctctgctcagaagccagacgttgtctctctcttaatcatttacccttaagtagctatggtagttctattaagtctgcagccttagttttttggtttttttktttgtttgtttgtttgtttttagtttactcctacctttctaattatttttttcttattgttcacataattctgcatcacaaaaaaaattttattttttaagaaagtggattaaggggaaaggctaaaaaaattaatttgtggggaaatggaaagcttggaacactaacatttttacaaaatttgcccttaatatatttaaacattgattaaatacaattcttattaaattcattgttagaaccaagcttggagtaaagaattatgaattcctttgaaaataaacttcatattcagaatgaatttaataaatagaagtagtagaagccaaaaataatgggatttattaatttagaacaaatctagagtagactatcagaaaaaatccagcagatcacatgattgtaacatagttagtgaataaatatgcaccctcagggaaaatgatcagggggtcataggggaccamgaataataaggcagctatgtagcrctaatgaagagcaagctgaattcagaaataaatcaagaaaatgaaaaacattttctttacttcatattaaacctgtatagacatttctagttcttgtcctgatttgaaagggattcagaaaaatttcaagtaagtttggaagattgtcacaaatatgattaattacatatgaaaggaaaaagccaaagtgtgatttttatgagaagaaaaccattagctacctttgcactttcacttgtggcattaagaaagaattgatttatataatagtgaagcatatttggttagtcattggggaaaattatcacatgaaattaagtggcagaaatttttttttaaaaaaatagaaaatgtgttgaatcacattctggggaagtcttaggaaacaggttttatcatcgggcctttacaactgtggaggcaggaaaaagaatgctgtgggtttatgtgtgtagggttttttcctgccctagagtcaatgattttatgaaatacctaagaaaatctattccccaggattgcacaaaatgccttcattcctcttgttgatatacatgatttatttcttgtttctggaacttactacttctgcttttcaccaaaattttaatcggttacctaatcaataaacttttctcctgtttgtctcatttaacatttgtccaaatcagaatgggtgaataagattctactaaacactatagtatgcctttgtattatttataaggtatttgctaagctctgtatttccttggagagagttaactttttccaacaaaattatattaaatcataagtgctcttgccctattttgaaatcagtggcatgtctttaagatatatatccaagctctatttttcactgctatttctccctcttgattaccagaaatacatacatgcrtgcttgccttacccctagagtgtcaggattgaggtagcctgtaaattaactttatttcttagaaatatgcagcaatcatatactctacccagagcccacctatagttacctgcgttggacaagaagagaaggatgaacactaggtcattctctcctgcttatcatggtgtgctcgtgtctttcattaacacagagaaaaagaaattcatgataggctttccttcatttcatttcaarcaagtataggatttttactatgcttgcaagaaattatatacatatttggagaagcagcctgtgatatcaataggtaagttttctagttatccaggtgtccctgctgttagccttttaaatttcactttgggagcaaatgctcaaaagtttcaaaatccagcacaagaacacatagactgaaggaatgttcttctggttgctttagagggcaaagtatttccaagacatgcaaggctcttttggttaggatcatagaaatgataattttgtctctaggtggcatttataagaaactatttatagtggtggaagtctctctctgactgtgtttttatttagcatttttctaaaagatagatttgtatcttgatattrttggaacataataaggtacttatttcacttctcttttgtgagaaaaaaacctgtcgtatgagactttccagcctctggaaccacctgaatgcctcggtcagcttcatttcagccccaaagtcagaaagaattctctgtggttctcctttttagcttgtggttcccagtcctaactcaccttcacattgcctggggagtttttaaactccattcctacgtgaattttaaactgtattcctttctttcttactttctgcagacagacctgatgcacagcctgctgtggaatgcctcaccacaggacactcagatgcaaataaatctttggtatatctatgatagattrtatctatctgatatatcagaaagatgcctggtagatttgaccagtctggagataagaatagtggggaaccctaagtacttaatagcacccctgacaattttaaggggtacttctataaagaaccatgtcttcccagctgggatggatagcacagtagtacgggtgatcctctgctcctaaaccacaggactgtgtgtaaaatcctttggatagcttaagctaatgatttctcctttagatatcttgcccacattaacttgaatgatcacaccttaatcttatgtggactttcattttttaaaggcctgtctcctttgcctagcaagggaaaaaaaaaaaaawawawatatatatatatatatayatatatatatatrtatatatatatacactcatttaatttctctaggttctttaataagcttaagtaactttcttatctgctatttgaatatcaaagatgttttaaatataaaaaatatcacatataccttgcgaagaagcctatgggtccttggctgcctagttgataaaatatctcaggttatgaaaagtgttagcaatgagtgaatgaaagagcatgttttagggtgtcatttgggctaagctagaaaagaagtcacactctgagttctttttttttttctggtgggagatcaatactgtctagacatggtctcattaggagtttacattgactaaggcagactcggataacagtgggactgttggtgagatatttgtgttgctcattactacagagaactccagattcactggtgtcaattctgtgcattccagcatccttctactcaactgtagggttatccgtgagggcaggatatgcccacccatgactttgtcaagattctgaagcctagaagttttgggaactactctctaggatgtcctaacatgcttgatgacagttgtgtaggccctcggagcgtccttggagcactggaattccctrtggtcttccaaacataaaaccagagatgtagttcgattcacatctaaaggcctcagcccatccctgagagccagaaactttcctgacatacagcctgcctattaatttctgcaaataacatcttcatgtatggaaatatcagaaatttttttttaatatttagtagccttctcagttctaagacatttttgtccatttgtatatatttttttaaattgaggaactttatgattcctcacctaggaccagaacttaaaagccctgcatcctttcccttaggcattcagactgctagatatgctgctctgcatggaattttaaatccttcatttgcggtttcttgttggcattttgcaagggactgaagcaatgtctgagccactagaggccagaggtggcccagcccaaccaggtttctgacagtaaaataaatatctgttatttgtccagtgtcttcacttttcaactttgggcaagataagcatagacattgagaaataatgctgtttatacaaaggattgctcatgataaaagatctctttctgggaatttaagttttccggtacattagcattattgattatttattctctttccacatagtctacagatgattttagaatcccaagactattattctcccttgtctagtgtaattaccagaacagggaataatctaattaaaagacaacaaggatgggttctaattgttctaataaattatgttaacacacagtgcatgccgttacttttcaacaggaatttatttaacacattgacagcttgtcctttactgccacaatcttagattccatttcttctaaacaagacaacttacaatagggtagttaaatattcagaaatctgttggattggtaagagaatctaaagatctatgtggtaaatacagatgaagaattggattttgggttctccagataaaataatgacccgaaacagaagaggagaaaataaagaggaatagagtctaaagtaaaaatcaaaaacagactgttgtaataagctaataaacttttcatttgcttttctattatcaagcaaaatgtacatgataagatgatactaactcatataattgcatttgcttaattttagacattttacacaaatctgttagacaccacattgaaaactgcatatatgagatggtgccttcaataaagtcatgtcatgatatgggcaaaacttcattcattactgataggccatatgtttttaacagaaaacstcagtctccttgcttatttgaacataattcagatataatttgtcacataattataagagaaagccctcaaggcaatacagaaaaagaagaatgtggggagaaaataaaatctatgtagagaatgaaggaaagtgtacaatcaattctaaataaacacagacactctttacctatttcagacaagcagattcccaggttggcttgtgttattgtccttgatataaaaacctttgacatttaattaacaagtttacaggtaagtagggatctttctcacaaggaaaactggggactttgtaggaataacttttcacctctgcagaattgattcattcacatgtcaagttcatcgcagaatatggggctggcaaacatgcggactgtagttcatattcttaaagcccacttattttagaacagcagtcatagagagaaaacaaaaaacaaaagatacatcatgaaagatgtgaaaattagaagaaaaatcatctttattagcaaaggaatgcctcccaatttcctccctatctgcatatatcctggcctgcctgggtgaggatttttggctccttcctcgctgtctattgtattctagttcacaccttcatttctgatgggccactttcatgcttgtttttctgtttttaaaaatgtgtcatttctttcaaggcctttaggctctgaagatatctttcctctaaagaggactgagtgctagagagctcctcacggagctgaaggaccctcgccaccgggtctaaataagatcaagtcccctcygagaggcagcatgaaggtggcatgcagttttaaaaaaaaaatagttggactgtaaaggaaataaagacgtagttaaataagcccttatgttatcacatagacactttttattcttctgtttatttttttctgtgtttttctgaaactacttttcaccagaagtgcgatagcagttatgtaaatgcagaaatctattccatttcatgtctagagccaactctagatgcttctaagggggtggggtgagctatgtggctgggcagagggtcagcataataaacgggagagggagagggacaacaaatgagctgcagtccctagaggtctttggggactgggcatttctggggcatcgaatgtgaacttgacatactgtatgtaaatctgatttttttttctcagccactgtcattggaaaattttcatttagtaaataatgcaaaatatacattaagaaatgttaatgttttgacagacactgacaaatgccagggaatcagaagcaacaggaaagctgaagcacttcactgaatgtgctgccatctagccatgatctcattgcatgctgcttcactcactggtcacagagacactgaagtcattcggcaggcaggatggagtgtgtgtaaaatggagtgtagaaggcagggaatcggctgagtcttttacttttattggccattaacacatcctaccagtccataaactaaattttgatacgtattagactaaagataatgttaataattcatggaaaagctactttaaaaagagtgttatagtagcaatcattgctttaaatattacactcaccattttcgtctgttcggtagctcctcgtggtacacaggataaagtttactccttagtagaggatgaggccctctagcccagcatccttcccttagctgtcttttctactgcatctcttgcttgttccaatgggtgttctatacctcagccaggcattcagtctcacagattctcaaatgtaccatcttttccgcttttctcagggctttcgtgctgggttccccttcacccaggaagtccttttactacctaactttcagaacctggttcacacatctctgagaagttttcactgattctctcaagcagtgctgattctctctgtgtgtcagcatcgtgacaagtacatacctgcatttttgcacttatcacacattattgtaattatttttcacatgtttattttttctgccagaatcagtttcttgtagcctggtgacatttaaattcgataggatccggtttattgtatatttttttagctcttcctacatgtattatttttgagtttctgctgagactcaggaacttaaagctttcaaagtcctgaatgcagataacaatcaacagtcaagccagtatcctattgcctgtgaaaatatcctcaggaataaaggggaagtaaaaatattatcagatgaaggaaaactaagagaatttgtgttttttgtttgtttgtttgtttgtttttgtttttgtttttgagacggagtcttgctctgtcgcccaggctggagtgcggtggygcgatctcgactcactgcaagctctgcctcccgggttcaagcgattctcctgcctcagcctcctgagtcgctgggactacaggcgcccaccaccacgcccggctaattttttgtattttagtagagacgggtttcaccgtgttgcccaggttcgtcgcgaactcctgagctcaggcaatccgcctgcctcggcttcccaaagtgctgggattacaggcgtgagccaccacgcccagccggaaaactaaaagaatttgcataattgcatcactgcactctccagcctggatgacacggtgagactctgcctcgaaagaaaagaaaagagttatctaattggaaagaagacaattaaaaatggatctcttcaacatcagaaaggaagaaaaaaacatagcaaaaacatttgtactcttgagagctctaattgtgtttgaagtttgaagcaaaaattgcaatattctgatgtggatgtaaatgcatgtaaaggaagtatttaaaataattatattataaatggggaagataaagggatgcaaagtgcggagatagggtttctatatgttactcaaactggtaaaatgatgacaccagtaaactgtttagttataaatatataaagtaatacctagagaaacctttaaaaaattatatacagaaatgcactgaaagacactttagataaatcaaaacagaattccaaaaagtgttcaaatagcttataagaagtctgggcaaagaaaacagaaaaccacaaagagaacaaacagaaaataaacaaaaaataaaatggcagtgtaaattctaaaatatcaataattacattaaagttaaatggtctaaatataccacttataatacagggaagagattagcagaattgtttaaaaaatatgacccaactatattctgtctatgagaagctcactttcaatataacaatagacgaaagtaaaataatgggaaaagatgtatcatgcaaactttaatcaaaggaaaacaagagtagctggttctttgaaaaggttaataaaactgacagtctagcaagactgacaaagaaaagagaaaagacacmaattaccaatattgtaactaggcaacttaacttccaaatgcattttaaaacatttttttctcttctcttggttttcaagatacaaccttgaaaaactgcagaagccttttcctcagcctagaaataggctccacgtccctccctttttcaccatatatactcccttcacatttgtctaagtatatactagtatctaattactgtgccttcttagaagttccaggggctaatcttgagacaggcggaataagcttggagacccagctgcaaaattccagagattacttcaaagtggctagttaaaaacctggccatggctgctcaggaacttaaagcattcaaagtcctgaatgaaataataatcaacaatcaaagcagtgtcctacagcccgtgaaaatatcctcaggaataaaggggaagtaaagatattcccagatgtcttgactcaccatccaggtagactgagacccaagatagctaccagaacaagacacacagatattatacttagtacaattcttgcatgccttccttatcaagttttccctttttaaacccctgccttcccccaaaatcaaagtgattgctttgggcgggaatctgaccatttcccctttactggttttagtaaaatgactttctttctactagacctcactcttgttaactggactctgtaaacagtgggcatctggacctgcatttggttacaatatcaggaatgaaagaggagatatcactattgaccctgtagacatcaaaaggataataaagaaatgccatgaacaactctacacacataaatttgataacttagatgaaatgggccacttcctcaaaaacacaaattcctaccattcacctatcatgaaatagataatatttaaaagcccataactattaaaaattgaattaatcatttaaaaactccctgaaaataaatatttaggcccagatggcctcactggagaattttaccaaacatttaaagaataattaataggagttttatacagtctcttccagaaaataggagagaacacttcgcaattcattttaggaagctggtattactcagatatgaaaaacagaaaaaacagtgcaaaaaagagaaatatataccaataactgtcataaatagagacacaacaatcctgaacaaaatattaacaaacaggattcaggctaaaagaataatataccacgacgaaatggagtctagtccagcagtgcaaggctggttccaccactcctattcaacatagtgcaggaagttctaatcartgcaataaggcaagaaagggaaatgaaaggcatacagatggaaagaaagaaaactgttaatatttgctgatgtcatgattttctacacagaaaacactaagtgatctacaaagacgaaaaaacacaaaaccaactcttaaaactagtaagtggctgggtgtagtgactgatgactgtcatcccaacacgatgggaggccgaggcaggtggattgctggagcctagttcaagaccagcctgggaaatatggagagacctcatctctcctcaacaacaacaaatgaaccaggcctggtggtgtatgcctgtcatcccagctacttaggaggctgaggcaggaggatggctggagctcaggaggttgaggctatagaaggttgtgtttgtgccaatacctgtgtgccactgcactccaacctgggtggcagagtgagaccctatctcaagcaaacaaatgaaaaactaataattgagttcattaaggtggcaggatatgagatagacatttaaattatcaattgtatttctttrtactagcaatgaatctgtggacacaaattttaaaaatatagtacaatttgccttagctcaaaaatatgaaatacttatgtgaatccaataaaacatttataaaacttgtttgttgaaaactatataatgttgatgaaataaattttaaaaatgtaaataaatggagaaaaatgttgtgttcatgatttgaaagtcacagcgtagtaaagataccgatwcttcccaaattgatatacaggtttaaagcagttcctatcaaaaatctcagtatgatttttttcatatatagatgacattattctaaaatttatacagaaacaaaggaactagagtagctaaaacaattttgaaaaagaaataataaagtgggagcaatcagtctacccagtttcaagaagtattgcatagttactatgtggctatccatggagtgacagaaacatagatcaacggaacagaataaagaacccttcttttagaaggagaaggcattagagaaaaatctttggaatctctggctagggaaagagttcttagatttcacataaacacaatccataacaggaaacaaatgatatattggtgatatattggactatatcagaattaaaacttttgcttttgcaccgtgaaagagtttttttttttttttttcttttcttttcttttttgagacagtgtctcactcagttccccaagctggagggcagtggcacgatctcggctcactgcaacttctgcctcccaggttcaagcaattctcctgcctgaggctctggaatagctgggactacaggtgcatgccactgtggctggctaagttttgtattttttttttctttttagttgagactggcttttgccgtgttggccaggtctcaaactcctgacctcaaaagatccaccctcctcggcctcccaaatgctggtattacaggtgtgagccaccacgcccggcctaagacccttttaagagaatgaaaagaataactacaggctggaagaaaatatttgcaaactacatatctgacaaaggactagtatttagaatatataaagaattttcaaactcaacagtaaaaaaatccaagcaactcaattagaaaatacatggccagacattttactgaagaggttatrcagatggcaaataagcacatgaaaagatgttcaacattattaaccatcagggaaatgcaaatcaaaaccacaatgagttatcactatgaacatattgaaataactaaaataaaagataatgataacaacaaattctggtgaggatgcagagaaattgtgttactggtgagaatgtaaaatgttatagccactctagaaaatggtttggcagtttcttacaaaattaaacatgcacttatcatactcctgggcatttatcccaagtaaacaaaagcttatgttcacaccaaagcccatacatgaattttcatagagctttatctgtaatagccccaaactggacacaactcagatgtcctttattgggtgaatggttaagcaaactgtggtccatccataccatcgaatactactcagcaatgaattattaatacatgaaactacttgactgaatcttcagggaatagattaaaggggaaaaaaacacaaaaccaaaagattacacactgtacgactccacttgtataacatttttcaaatgaaaaaattatataaatggagtacagatttgtggttaaaagttaagaaggggtggagtgggagggaagtgggtgtggctattaaagagcaacaagaggatccctgggatggacacattctgtgttttgaatgtgtcattgtcaatatcttggttgtgttactgtgtaatagctttccaagatgttaccattgaagggaattggataaagggcatatggaccttctctgtattttttcttacaaccttcatgtgagtctacaattatttcaaataaaaaatgttagttaaaaaaggggaggggaatatgaacaaaaatcatagaggagaaggtcacagaatacaattgtagaagctgccttaaaaggccagggactgatttaaaaggggagagaaacggtaaaatctaaactgagattctagaacgtgtcaggaattcatggcactgtaaatgtatgaaagtgggaatgaaggaatattaaaagaacattgaaagaatgacaaataactgctaaycagtccccagagttcttgcccaayccgcatagcctgggaactgcctctcccaactgcctccctccctacttccccaggaggaagactggaggggttggaccaactacagggctcgtgattggagtcacmatgcatagctgaggatgggtataatgatgaaaatcggggcttaagtgaaagacaatatgatggggcttctgctctttcccatacttaaatctcagaacaatggcacccaggcttatacccctaaggcaggagattgaaagatatctttctggggaatttgaccagcccaaggaaagagacctataaatatcaacaaccagggcttttctaagccaatctttctagaactgtgttgtctaatatggtagccactagcaacatatatggctactgagcattcagactaatcaggttagtctgatttgagatgggccttaaatgtaaagtamactctgaattttgaatgcttagcgtaaaatctcttattaacttttattaacatgttgaaataatatttttgatatattgggttaagtaaaagctattattaaaatagtttttaaaatgaataagagactgaatttcttccagattgaaaacaggaaaaacgacttttatggtgcctctgtgcttttttttttttttatgaattgatttaaagcagcacattatcaacacaaagggagtgattagccaggaaggagaaaaaatagttgtgaccacgtatgtctgacatacctgatgtatctctttcttgctggtttctattgaaattggtttttttaaaggcacaatctgcggaatgacagtaggcaggttatctgggcatccctatgtatttcatcctcccaagtttatgttaaatttgttactttgggtgagagtgacacagacattgggcatggcaaggaggttctttatgtatcagtaggagtgcctccaatatgttttgggttgtccagtgagtcattctgtctggatcagaatccaagatctgcaacttagtaactgtgatttaggtcaagtaatttaactctctttgcctctgtttcctcattggtaaaacaggaatcaaaacaatagaactctttttttttctttttatctaattgtattcttatacaattagataaaaagtacaaaataatagtacttttaaggtcattgtgaagattgcatactttaatgtggggaaaaaaatgtttagatggtgcccagcacataatgagcattatataaatgctgcctattattattattattacttggggctaagggctctagtattatctctgatccttaggccagcttgtaaggtaagtagtgttgttatctaagattctgaggcttagagaagaagctgctcaactgggctacaaagtcacttcaaaaacctgagatttttttccattatacaatcatgtctcataaatcttagcgccctattgytgaaagaagccttttagatcatcctaggaggtttctgaactattctgcagagtgagtggttaagggttgggctctggggtccaaaaaaatcgtgtttgaatcctaacccatcactcagagcagctgggtggtcttggacaaactcttcaactgcttttctcttatgtggtgtctccctcataggttgttaggatgattaaattagataatatatgaaaagttmttggcatactaagtgttccataattattaatttttatgattatggttttattgtaaatatgaactaagtctgargctggtggcagaggtacaacccgaactctggcaggtctttttattcagtgctctctcttctccattttgctatctaattggttagtttttattcatccttttagagtctacatttctaaagtcagggctgttagtgaagattttagaagaacattttccaagagtttttttgaactgccaagtccagagatttaggatgtaccttggtgctgaagtaattggctctcttagtcttgcattataagaagttctctttcagagtataaggttgagaaccatgagaagaactctcacattttagtaattgctttatggaataacttacctcctaaaaacataygtttttcagcttcaactcgttcctttcctttctgtgccattttgagaatctcctcattatatataatcacaatcttatgttctgagtttctccttttaactatttcctcaagtgccatcacttaataatattttcttttctgtttatcaactagttggggaagtggtatgsttgttagtactgatgagtttcttaggaaaatacagaaataatttaatcttaaagattttctatctgtcagagaatctgtcataaaacatgcctgaagcaagctgcacagtatttactgcccttatatcacacctagacacagttcacgattggagattaattcagaaattctcattaatatgttaagctaaggacaaggatgagatgttttaatacttccataaatgcaacatttgttttgtgtgtgtgtgtgtgaattggattgctttgctgtgaacaaggcagatctctactttgctctaatatcgataatgtaggtgtcttccaaatttcttttaaattgatttctccgattcccgatagttagccagataggccatattatagctttttgctctcctaatgtagaagagaccaaaggactaatagtttttccaaaataactgagagaacattaggatatagaattacaaatatatttccattttgtcataaagtagcttaatatttttccctgttgcttagacattaattaaaattgtgacatttctcttatttttactagcaccagaataagaaaggtaaatattttgttacaagaatcttattccctgagagaaatctctaatggtaccttatatttcacttaccactctcttcttttggtttatgtggtgcttctgtttggttattgggctgctttacaatgaaaatcatgctaaacttttcagccacttttttgagttctttcctctgaacctggagactasagaaaagtaagtgtagggaaggaaaaataattttctctttaccctttatggtccttaggttgggatagacccagaaacaagagaaaaacaaacagaagttaaaaatatgtgtatctcatgtacacgtggaagatacccagagatatgaataaatctcaaagaggtggctttgagatcaggctcaaataccattgtccactgaaagaaaaaaaagaagggtatgggggatagtcagttgtggagggatgcccaggaaaagtatggtaaacatgagtaaggtttgttatgcagatttaagttggtgtcttctccattggtaagagtctctagtgatttggtcatccttctcttcctggtayagaaagggagacacccttatgagtagaaatttcctttatagatgtaaaatccttttacaaaaaggtaacttctcttctgttttcagatcttctcctgtagctgcagtctctcaaaataatcagctcaaaataatccttatgctaaagaaggatgttgtggggaggcatattctgatctaccgagtttcagttcttccctccttctaatggagcccaagttgaaccaggaaagctttatattcttcatccatctgacaatcagaagttattaaatgctttccatccagcaccatgttaggtaccacgaatactacagaaagcacattggacaattcccagatctcaagaaacttgagatctcttttccttgttttcttttacttttttctcctcttctaataactttccaaataatttgaggctgaggctgtttactaaattaaaggtagtctacaaataatagaacaattaatcatgaaagagaaacatggccatctttagtagtataagttggtaggcccatggaataaactaaatttggttgtagatatccagcaactaagaagaaagggaattatttggcatatgtaacattccttgtctgaccagagaaagcattccagtttttccatgcaggtgaaatctctctgtgatcaaacccagaggggtaatttattggttacaaagtaaatattgactttggtgtggttttcaaacatagtagtaggtgttgggaggtaaggatgcaggcatggatcatatctgtctttactatggtgtttctagagtttggcactgcgcttggctcatagtaggtgcttgtcacatagttgttagatttaattgagctattcagtagatcattttgcaatgacttttgataacaatgataaagtgctgtatactccatgcctttgaatattgttgtgtttctctcaagaaagccatcattccatcccttgttctccttctcatccttcaggtctcaggtttaatttaagttcctttgttttagtatctcttagagtgatctgctcctttgtttttgtttgtttatttgtttgttttgagacagcatttcacttttgttgcccaggctggagttcagtggcaccatctcggctcactgcaacctctgcctcccgggttgaactgaatctcctgcctcagtctcccaagtggctgggattacaggcacccgccaccatgcctggctaatttttgtatttttagtagagatgggtttttgccatgttggtcaggctggtctcaaactcctgacctcaggtgatcaactcacctcacctcccaacgtgctgggattacaggcatgagccaccatgcctagcctgctcctttcttttagacctgttccctgagtttcaaaggtttcacttcctatgggagcctttgactcatgcccatctcctctaatagcttccaggaggattagatcacctatgtaccctagcccctagcatatgtgcctggcacatataacaaagtataaatactttgttaaatgaacaaaagtaattaattactaaacaatgtagtgagttgtgcttttaatgagcgttgaaggaaaattgaataatggattaaaatgaaagtaaggttaaatataataataatgatgacatatataatgataatgttaaaatggttatgttaatgttaaaaaaggtgaatgataatgttaaaaatgtgatgataatgttaaaatgataatgttaaaaaaggtgaattctaatcatgtgccaggttctttacataaattatctcactgaatccccctaataacttaatgaggaagccaaagttattatccttattttaccaaataggaaaatgagcatggagaagactgatgattacttgggtacaatcatgcacctatttggttggtagagcccaggattcaaacccatgtccttaaccactatccaaaatatatccctgtgctattttactaaagcattctcaagtccacaatctggaggaacagaattatctgtcctcatgtgtcctgagtagtgtgacaagttaccctgtgacaacccaaaatagcaacagtcccccatcatttcacagtgaggcttcagccttgcttctgtccaggaacagaaaatgtagcagcagaggccatatgattctttcctttcactatcagtggagctggagagagatgttcttatcacccatcccattttagtgcacagctccctagctgaacgccctttgctgcagttccatttataaggagtatcacatacttcatttgttcatttgaaaacccgatgtttattgcagtgcagagcagccacattattataagtacttactcagacaaattaaatgattcagtgtagtagctctgaaaagtctaatttccatgtgtggaatcatgtttatcaacactcaaattcaaaggcgcaaaatagcatatttacattggtaacttattcataatattccttttctaccttgctcgttttattgttagaaaccaatccaaatcccatttttaggatgacacgtacaaaaggatgatatgcaactattgtaactgtgatggaggccaagcaatgagagcaaagccagcattctactggtgcctcctgccttctagtttcatgtattgggatttggggatggccagatttttctttgaaggtttggttgtttctttttaaacatacaatattgacccaggaggaagtattcaggtcactttgggctttcacttcatgattactgaactttcctgcaaacttttttgccttcacagactctctctccaggaagagaaggaacattcttcacaattctagcccctttcaagaatgacctccttggctcaaagaggatcttgcagttattagcagcaaaaatgaattatcctaaagcaaactcttttttttttaagcaaagttttcwttttgtggggggaaaacctaatctcaagtcctagaacatggaaggttaatgaccaacttgctttaaagagagaaatatgacaagcaaaattgcsaaatctgctgaagaactaatcaagcatattgttcccttgattctagaaaattgcaatgtgcttttaaaaaggttgaaaagatgtccatggtgtacccttggtttactttgtctgtaaatgtgtgttcctgtgtcctgtagtgttggtggttccagggccagtggggatgcagtgaagaccatggctgcttccggtgttctggtgttcccctggcagagagctccttgtcattccaaatgacagatggttccctctgcgggctgaactgaaattcagccctccacgctgagacagtctgctaggaatcaccaatggtcacgctgattattaaaacatagttttgagtttcatccttaaaaaactaacctcgaccagcctgaccaacatggagaaaccccgtctctactaaaaatacaaaattagccaggcgtagtggtgcgtgcctataatcccagctacttgggaggctgaggcaggagaatcgcttgaacctgggaggcagagattgcagtgagccgagattgtgccattgcacttcagcctgggcaacaagtgtgaaagtccatctcaaaacaaaacaaaacaaaacaaaacaaaacaaaaaaactaacctcatctatccccatctatgattagcgattagcttaagtgcagtccagaactggtaactcccttccttccttctttccttccttccttccttccttccttccttccttccttccttccttccttccatccattcatccctccctccctttcctcctttctttactcgcagaaaacaaaaaagcacagatgagcacaaaaactagtgtaatgatcatctgtactctcactatcccaaaacgagtatctgtttttgtttggtcagatttgcttccagtgttgtttttttcctttttaaagaagttattgataaaaccaaatcattttcaccaataatgtcctgtccttccctccaccctccactttctttgctgcctgtacccctgcctaaaattccctaccataaatttgggatgtatttgactagtccgttgtttatacttttacatacatatatgtgtatccacagcagcagtccccaactttttggcaccagggactggttttgtggaagataatttttccatggatggggaggtggggggtatggttttgggatgaaactgttccacctcagatcatcaggcgttagggtctcatcataaggagcaggcagcctagatccctcgcatgcacagttcacactagggttcctgctcctatgagaacctaatgtcccygctgatctgacaggaggtggagctcaggcggtaatgctcgcttgcccaccactcacctcctgctgtgtggcctggtccctaacaggccacagactggtactggtctgccgcctggcggttggggaccccgacctayaatgaatacatactattgtgtttgtatgttaacattttcctttgtgttgcttttctgcccatgacatttatgaaacatccacactgatgcctataaaaccaatctattctttttaacagccatatgtcctttaatcatataaatatagcatattttatttactgatttgcctttaagggtgacttttaggtcatttccaagttttgttatactgatttaatatatgtccccttatgtgtatgtttcttagccctggtataccccccaagaagagttactatgccgtggcatatgtgtactgtcacttttgataatacagtaaaattgctcaatagaataatataccaattcatgattccgctggaagtaaactagaataatatgctattttttctcatatcttggacaacactgaattgtgtcagtctttttcatgttaactagtctgatagaaataaagtagaatcccattattttcatttgcattttcctcatgtttagtgagagtattagtcagttttcatgctgctgataaagacatactggagattgggcaatttacaacagaaagaagtttaatggacttacagttccgtgtagctggggtggcctcacaatcatggtggaaggcaaggaggagcaagtcacatcttacagggatggcagcagacaaatagagagcttgtgcagagagactcccatgttttaaaccatcagatctctcgagacttattcactctcatgagaacagcatgggagagacccacccccatgattcaattacctcccaccaggttcctcccatgacacatgggaattgtgggagttacaattcaaggtgagacttgggtggggacacagccaaaccatatcagtgaggttgagctgcttttcttatgtccatggtccattgttccttctttgaatcatgattttaaaaaatatttatttgtttacctttttctttttgttgattttaggagttccttatatattctggttacttattccctgtctgttaaacctgttgctaatatctttggctggtctggcatttgagaagataatttattcagatgatcagtacagttaagttgttacggtttctaatttaattctatgtactatcaagaagtcaggcgtatctctacctgcaatctattrcaaatccttttggatctgctttcaaaatatttcgcataggactgaccagttttcactctcctgtgtgctacctggctagcacctttattcaccaggataactgcaggagcctcctaagtggccttgttcttcagtttattcttaccgaatagccagagagagcttattaaaatgtaagtcagatcttggttcacctctgctcagaagtaggcaatggcttcccaccttgctccaagtaaaagcctaagttcttagagtggcccataaggtctagcaccctccagctccttgtcatcactctgacctggtttcctgccactctcccctggctattccagccatactggcctccctgctgttctaacatacaaacatgcacctgcctgggaggtttgtactttctgttccctctgcctagaatttcttcatccagagccatcatcatggytgtcccctgcacctcaaatcttccctgagacattaccttttcagtgagatctttcctgatctccttgctcaaaaatgcaacaatctccccaaacacactgtattgatttcctagggtggcagtaactaagtaccatatactgagtggcttaaaacaaccgaaatttattgtctcatagttctggaggctacaagtctgaaatcaaagtgtcaccagggccatgctccctctraaatctgcaggggaatctttctttgccttttcctaacttctagtgatttgctggcaatccttggcttgcagctayrtaactccaatctctgcctttattctcacatggcgttccttctcccstgtgtctctgtgtcttcacgtggtcatcctcttatatccaatcatattggatgagaggcctgcccaccgatctccagtatgacttcatcttaacttaaataattatatctgtatcaatcctattaccaaataaggtcacattctaagtactgagggttaggacttcaacatatcttttttcctgatggggaggggttgggggaacagaattcaacccatagtactcaccatctcccttcctactttgtgtttctccagagtccttagaactatttaaccactcatgtattttacatatrtattttgtttgtttrtctcctctaccagaaggtaggcagcatgatggcctgatcttggactattatgtycactgctatagagaatagtgcctgacaccttagtagagtctcaataaatacttgttaaatgaatgatcatctgctttcaattactacattgagctgaccatgtaacatgatgtagaccaagattattagattaaaaaaggaaacgattacctctaaatgagatcctagggaatgaattggtgtttatgatatttttatttcaaagaagtgtacatgaaggaaacccagaggtagaggtcagagcagtgaggaaccagccagttaggggattagtgcattgtcattgagtgatttatgagcagcaaggtctcaatagcctccctgtcacttgtccactttggggttatccctgcaagtaaggtgggtcatggggctttcactttgccctagcatctaacatgtgccagaaactgtacttgrtactttattctcatttagaaaaaaaaaatcctcttcataaatgtacccttcaaatattattatacmcgtttgatagagatagaaagtgagcctcagtgatgttgagcagctacataggayacagaagtagtaaacacattactaggattcaaactcaggccagtgggaccaaaaaaacccatgtttctttgcttgtcagattccttcagattctgtggacaccagagtttcaagggaaagtgagtaaactggccacacaggacacttcagacaggtgacttggcatagaccaccagaaaaccagagaaagactcttcccaccagactcacgggtcagcctcatctttttgcaaaatggaaagccccagtgccaggactttccagttcttgaggaggatcagatgatgtggctgaaacaaccctggactaggaatcagaaatgaataattaaggcatggttctgccccttttcttgtgtgatcatgtatgaaccacttacacccttttgagccacagtctccmatgtacagattaatgacaatgcctgcaaaaatcacatatgtaccttcattctgcscttttaacartayctgtgtggcaatgctcagtattcatggtgaacgttcctaatgaaattgtacctagagccatctggatcactgctgaaataatcatctgaatttcttgtccttggtgtaggtatcctaggaatacctgcctgcttagaccctctataaaagctctgtgcatcctgccactgaggactccgaagaggtagcagtcttctgaaaggtaggtttacttaattttgatttttttttcaaagagtttgaaataattgacctgctgtgagtatccttataatagtagtaatgttcctatgtacttgtaaaatagaacttttaaaatggtaaaatttcagggctagattcccttggagaatttaccctctttcgacttctatttgtagctgccattttaaaaattggggtataaatattatgtcagttaaataaaagaatgatgacttcactttctgaagaaagcattccccttcttttccatgaaatgtagcttacctgttacctgactgacatgccattatattatcctccccccagcagttacacatatttaataatttttacgtgtaaaaagtaaggttaaacagttacaaagtcaggttgttatgttttgcatgactttgagaatgctagtggaatggaaataaagttaggagcagcaggaggaggctctgttgaaacagatctccttcagtggcatggtactgttcatggtcagaggaagtcctagggcatatgctgggacagacagtgaagggtaggtcttacaaagaggctttacgttagagtaaaataatcacttatctgtatgcatctttgaatgatttcaccggatatgttgaatatgtatttttaaaaayagcagsaaagggcctgtaatcccagtactttgggaggccgaggtaggtggatcacttgaggtcaggagtttgagaccagcctggccaacatggtgaaacctcatctctaccaaaaatacaaaaattagccggatgtggtagcaggtgtctgtaatcccagctactcaggaggctgaggcaggagaatcacttgaacctgggaggtggaggttgcagtgagctaagatcatgccattgcactccagcctaggcgacagagtgagaccctgccaaaaaaaccccataataataataataatagcaagaaagtaggagcaatgcactaatctggtaatctctagcatgtcgtcaggggactgtgctcatgtaacccctccttaggactcatatttactcctctccttttctgttacctcatctcatctttactcctttaacagtatctctcatttccgggtctcagacaatttaacatgtataataaatatgtatattgaataatcctatgtaccagaacacaaagatactrtattccttttcctgcttccggttaagtcccagtttcctgtatccactttacaatgtcagccagcttatccttcgtgctgccttccctttccctctcattccaaagtcacttgaaacccayggtttatgcaaaatttgcaaagttgggcaggattgcccctagagttgtagaactgtgagacattgctgcatcttgttgtgggatgaggcaggcatctttacttcctaatgtgccagatttttctctggcaggtcacctgcctgtttagatggtttacctggaaaacaaagtttaaaggcagtaaatgaaatgaggtaaaatggagcactggtgttatgtgccttttcatatgagcctttacatataattatttgatccttttgttattgtttgggttagtgttttaagccctgaaggagggctttcttttttgaaatggagtctcgctgtcgcccaggctggagtacaatggtgtgatctcagctaaccgcaacctctacctcctgggtttaagcaatttttgtgcctcagcctcccaagtagctgggattacaagygcccgccaccaggcccacctaatttttgtatttttagtagagatggggttttaccgtgttggccaggctggtcttgaacccctgacctcaagtgatccacccacctcagccacccaaagtgcagggattacaggtgtgagccatcactcccggctagaaggttctttttaaacataaaagctgtcaatataaaatatattgtttctggaagggtggcattttaatatcaataattactgacaaaaaggactgtagactatttaagttttagaaaccctacttactcctagaaagacttctatyttctctcctaatagtaaagagtatgtgcctgatgtctccaaaacccctttgctatttcttctctttacaaagactgactcagagttctactgtttgctgtgtgctcttagtgaactcaacctctcggaactctggttacttcctccgtaaaatgaagctagttatgggaactgctcaaagaatagttgtgaaggattaactgacaattaatgtaaagtggttagcaaggtggctggtatacagaagctttcaagaagtggaagccataatgattatgattagaaggaattgtgcaattaccaactctgggttggcattttaggattttcagtattctgtttctcgtggcatattatctattgcagttttcaatgaggcaggatttagagatatctgagaccaaagaaataaggtaaaataacgtggcaaagtaccatgtagataatcactggtagtcatgattctgtataagcctcattgctttgagattaaatgccaccagtctaagagctagaattgattgatgttctatcattctatcatttaactttatgctgtgttttcattccaagtcttctcatgtacttggcaagatgatcaaggaagccctgagcctggcttctatttctacttaaaaccaaactcaaatgtcactaaatgagggaatggacggaggttaagtattttgaggagaggtgttaggaaatgcaaaggaatgtttcctaaatgtttttacttgtttccatttccaatatggctaagtaagttctactggatcygaaattctcacagatatcaactataaagtaccaaaagaccaaaaacaaaaaaaaaaaaaagaaaagaaaaaagaaaagaaaaaagaaattacctggaagcattagagaataaaawtaagcagacagattctggaggggagctgaaattcaaaacttggaagcacagrtcggtccagagtgagtttcccattttacaacttttagagtgagaacaggctaaaattaatgtcayttcgggtggccatcctccaatagaaaactcacagtgtttttggtttgaagacccaaagaacagggttcagggcaatcatagccacaggaaaatgaattcagaatcttggaaagaagagaggcagagaggggaagctcccaaatctgtatataaacactacccaaatttctggttgacccttgaatttattaatatgagacaaactaaactttcagacaaaaagagttaccagagatgaaggagaacatttcatgatagtaaatcattatattaagaagaagtargaattgtagatgaatatgcacttgataaaattccaagtgagatcacgtcatgtaattctgaggtatatgtcatgtgtatattcttgatggagcagacacaaattatcacaaagataaaagaactgaactgagattcgagctgctacccargggatagttttaaatttgagtataamtaattgcctgctaaaacaaataaatcaatacccttcagaaaactataacaggattgaagctctkcatacaataacatcaatacttgcatatcatacaaccccaaattacacgctatatggaaacccaataaaatgtgactcattctgaagacaaaaagcaattatctgagaccaattccaagatgagccaaatgtgggaattaacaaagattttaaagtggctattttaaccatgctccacaaataataggaaaataaactcataatgaataagaaggtagtaaacagaaactgcaaaaagaaccaaatagaaatcctgaaactgaaaaatacagtatttgaaataaaaactcattgagtatacttacagcaactggaggaaacaaaggaaagtgttagtgaacttaaagatagatccatagaaattttcttttggaagaacagacagaaaaaaagacttaaaatgactgaataaaaaaaataaacagagactcagggacctgtgtaacagaaattaaaatgtctagcttacatgtaattggagtctcagaaggagaagagaaagagaatgaaacagaacaaaatatttgaagaaataatgggcccaaattttcaaatttggtgaaatacataaatgcatagatcaagaaatgcagtgaaycccaaatgggatacatttgaagaaaactgtgcataggtacatcatattccaactggtgaggaccarcaataaagagagaatcttgatagtagccagagaaaaatggcacggtatctttggtggaacaatgctttaaatgaacgatgacktctcatcagaatttataaaggccagaaaaaktgaaatgatgtttttaaagtacaaacgaggggtaaaaaaaaaagcaaaacactgttaatccrgaattctatgtgtagcaaaaatatcctttgtgagtaaaggcaaattagtacattttcagataaaaggaaactaagagcatttattatcagcagacctgccccacagaaatgctaaaggaaagattgttcaggctataaagtgagataacaccagatggaatcttaagtcttcaagaaggaatgaaaaaattttggaaattgtaaatataaaagactagtttttcatgataagatctttaactacacaggacctgttaaagcaaaaattataacattgtcttgtggtgtttataatgtaatatgtacagatgtaatccatatgactttatagcataaagaatggaggcagtggcaaatggatttatacagttgcaaggttttccaattttatatgagatagtataaaattaaatctaagtagactgtgaaagatcaagaatataygttttaattcctagaaaaaccacygaaaatccaaagataaaatagaatcctaaattaagaaaaaaatgatccaaaagttgcagagggaagaaaaagaaaaacaagaagtggaggagcaaacagaaaacatataataaacttgcagctctaaatgcaaycatatcagtmatcagactaaatgtcagtggactaatcactaattaaaatgtrgcagtgtcatagcaaaattctacctgatgtacaaagaagagctggtacaattctactgaactattccaaaaaattgaagaggagcaactcctcccaaactcattctgtgcatcaccctgatascaaacctgacaaacacacaataaaaaaaaagaaatcaacaggccaatatccctgatgaacatagaggcaaaaatcctgaacataataccagcaaaccaaattcaacagcacatcaaaaggttaatttacyatgatcaagtaggcttcattctggcatgsaaatttggtccaacatgagcaaatacaaatgtgattcaccacataaataggatttttaaaaagccttagaatcatctcactagatgtagaaaaagcttttgctataatccaacatcccttcatgataaaaaacttcaagaaagtaggcactgaagaacatacctctaaataataagagccatctatgataaaaccacagccaatatcatactgaatgggcaaaaactgaaagcattacccttgcgaactggaacaagacaaagatgcccactcttactactcctattcaacatagtactggaagtgctagccacagcaatcaggcaagagaaagaaataaaatgcatcttaataggaaaagaagaaatcaaactatctctctttgcagacaatatgattctattcctaaaaaactcaaagacgccaccaaaagcctcctagaactcagaaacaactwcagtaaagtttcaggtcattaaatcaatgtayagaaatcagtagcatttctgtacaccaataatgttcaacttgcgagccaaatcaagaaggaaatctcatttacaatagcctgaaaaaatagaagtatataaaatacttaggaatacatctaaccaaggagatgaaatrtatctacaaggggaaccacaaaacactgctaaaagaaatcayagaagacacaaacagawggaaaaacattccatgctcatggattggaagaatcaatttcattaatgtggccatactgcccaaaataatctacaggttttatacaggtagtttataaaactactctaccatatttcacagaactggaaaaaactattataaagtacatgtggaatcaaaaaagagactgaatagccaaagcaaacttaaacaaaaagaacaaagctggaggcacacattttccaactccaagctatactacaaggctacagtaaccaaaccagtatagtactggtacaagacagacacagaaaccaatggaacagactagagaacccagaaataaagctgcacacttacaaccatctgatcttcaacaaagttaacaaaagcaatggagaaaggtttccttatttaataaatggcgctgggataactggctagccatatacagaagaatgaaactggacccctacatttcaccatatacaaagctaactccatatggagtaaagatttaaatgtaagaactcaaagtatgagaatcctagaggaaaacctaggaaacaccattctggacatcagccttgggaaagaatttatgactaagtcctcaaaagcaattgcaacaaaaccaaaawttgacaagtgagactaatcaaaccagagagcttctgcacagcaaaagaaactgtcaacagagtaaacaacctacaggatgacagaaaatattcacaaattacacaaccactaaaggtctaatatctggagtctataaggaacttaaatgattgaacaagcaaaaaccaaccccattaaaaartgggcaaaagacatgaacagaaacttctcaaagggagacagacatacaagtggccaacaaacatgaaaaaatgctcattgtccstaatcatcagagaaatacaaatcaaaaccaccatgagataccatctcacaccagtcagaatggctaaagtaaaaaaaaaaaaaacaacaaaaacaaaacaaaactaaacaaacaaaaaaaaaccacatgttggtgaggctgctgagaaacaggaatgcttatacactgttggtgggaatgtaaattagttcggccactgtggaaagcagtttggtgatttcccaaagaacttaaaacagaactaccattcgatccagcrattccattactgtgtatagatccaaaagaaaacaaatcattctaccaaagacacatgtacttgcatgttcattgtcacagcactattcacaatagcaaagatatggactcaacctaggtgcccatcaatggtggatcagataaagaaaatttggtacatgtatatcatgggatattatgcagtaataaaaaagaatcgaatcatgtcctttgcagccacgtggatgcagccagacaccattatcctagcaatttaatgcaggaacagaaaactaaatgccacatgttctcacttgtaagtaggaactaaactttgggtacgtgtggacgtgaagatggtaacaatagacactggggactactagagcagggaagaagggagaggggaaaaggttgaaaaaccaaatggtgagtactatgctcagtacctgggtaatgctaccattcatatcccaaacctcagcatgatgcaatatacccaggtaasaaacatgcaaatataccccctgaatctaaaatgaaasttgaaaaaataaacacataaaaacagatgaatgaattttttttaaaaagacctaagcccaagggctttatgaatgcaagctactttcaaatgattgacaaaatgaataagttttgtgggcaaagaaaccaaacaaayaaaaataaataaatattcaaaaaaatgctgagatgattagaatgtataaaaaagcaagaacagctatgttctgttaagagatagcctttaaataaaaaaacacagataggtttaaaataaattgatggaaataaatacaccatggaaacagcataggaagtctagagtggctataataatatcagacaaactcaactttaagacaaaaaatattatcagagataaagaagaagagtgtgtcataataaaggagtcattaaattaagaagacataaggattatacatgaatatagacttgataaaattccaagtgagatcactttatgtcttttcaaatctagaattttttgacgactgtctcaatcatgagtcaaaagacgcaagtggctcatcactttaagctaacaatcatttaataaaatcatggaataaaaacaacacaggtgaaaaaatgtaattggagagtatagagatctcagtataactgctgctaagttttttattgtaatgttttacaacacgtgtttgcttcatttaatgcgttgtatatgtttaagcasctcccatgatctaggatcaagttggatgccttcaaaattcttcaaatggagttcatatttaattagtatgcaccagaacaggcattaagcctatgctggttggtgcctttaccatactaatggttaaatattttaaatatcatttgtcttagtccattttgtttctgctataacagaatacccgagattgggcaatttattaaaagaaaataaatttatttggttcatggttctggaagttgggaagtacaacagcaaggtgctggcatctggtgagggcctttgtgcttgtcatcccatggaggcaagcagaagggcaggagaaaatgaaaatgagccaatgagagggccaaactcatttttataataactcactcatgataacaaacctactttcttcataatgatgttaatccatttatgaaggtagagctctcaagacctaatcatctctcagtggtcccacctcttgatggtccctcttctccataccatgacaatggcagttaaattttaacataatttttggaggggacatttaaatcataacataacccctgcttacaatagttatataagttcaaagtgtttcctccatttgccagtggaagaatctatggctctaagaggttcatactatgttgtccaatgtcatacaactaatggatagcagagccagccttcaaatctgaatctgtctgtttccaaagctgcttccactgcacagcatcgtttttctctggggaaacaccactgactcatttttgttagggtatgcatatgaggaactacagtgctatttttgtggactcccttgaagataaatgaacatctttatggtatgtctggctacattctggatatagtcaatttatgggttagaattcgtgtactgtgaagtcaccagtggagtcatggctgtgagacatagggaaacttggtatttcacatagaggtagaccatgattttggcccagttttgtgagtaccctgaagtataaattattaaacctgaaaatgtcacatgtgtgtattcttgataaagttctgtacttctggttgggcacagtggctcatgcctgtaatcccactttgggaggccaaagtgggtggatttcttgaggccaggagttcgagaccagcttgggcaacacgatgaaactccatctctactaaaaatacaaaaattagccaggcatgatgctgcttgggartctgagctgcttgggaggctgaggcaaaagaatcactggactccaggaagcagaggttgcagtgagccaagatgactccactgagcaacaacagccagactctgtctcaaaaaaaaaaaaaaaagagtctgtatttccaatagacatgtttatattaagaatttggaatttatggacaacttttccagatctccrtgtactctgtgacatgagagaaagacagcaagtatggatcttcacctagcctggggcagaattttacatcagtgcgtgaagtttggagggataaatgatttctaaatcatgtttaagggtctatgcatttgtgttttacttgtaattagtagaactacaattatttcttagagtcaacatttcagacttttaaaatgttactatgtatcgaatgccacactggctgattttgaaaatattctctctaaatctttacaatgatcttagaaatatatattatccctattttagaaataaggaccctgaagcttccatattttttcctcgtaactagaaggctaatatgtttgatcatcttcatggcataggacccaagcaataagctatggcttcactgtacttgcttctggggttttctatgtcatttccatgttatatgtgaggtgtcctagcctggagtcaggtgacatggattcttgttatggatcttactagttagctaagaaatctcaacttccttcagggtagcttataaactattttaagtaaggttactaacatatgtatagaaaatcaggaaacaaatctgctaaccgctactgctaacagagttgcaaacatacatttagcatgagaattcactcgagttttctgacaagcagagcaaagagggaaacagtagtttcatattcttgtaatcagaaaagttaaaatgtcagaaattcctcatatgacctctaagaacccttcttatttcgagattttataaaaacaggtgtaataacacccaaaattcagaatcttagtaggattaaataaaatcccatttgtgagtgaatgttagcttactgtttttcttcttatagaactccaataaaggctcatggtagaaatctcaggacagtcagactatagttagctttgttaaaaccccatactctgaatttctgtgggtaaactagtctctatttaagtatgcctgtgttgtcagtaactgtgcgaaagacttttacgatcttgttcakacaaagcagatgttattgtccatgtttcataaattaggaaactgagcccctgagaaatgatgtaatttgaccaaggccacagagaagtattttagtcagaattcgaacccctatctctctgtcaccaaggcctatgttttttccagtacrctgaatcatttctaaactattgaataatttaacagtttgggcattatttctaaaaacaattccagtttataaagtgatctgcatgaagaaccagcacatactgggttagaattcatgtactgtgaaatcaccagtggattcatggctcagaaagctccaccttgcccctgacaacatccagagaactttaaatatctatattttgtttttgtgctttgttttttaagaagcaatttcttcatcaagacttgaggacttggagagtgacagagagttaaggttgcctggggaccattagtgacagctttgccaatacagttggaatgttcctcaactgtaaagcttatttaatgaaaagagacccaagaaacctttctactaatgtgtagtgctctcttgtcagtttgaaatgagcaaactgtcagcttgccgattaccatgcacacagtatatgctcattaaatcatgcactgtgggtttcttcaggttgtcaaactgcttaattgaaaaaatgtgtagtgtcgctcctatgggaaagaggcaagaatcaaagggctggagagcttactcttaatatttcagtttgcttttaactgcagccagaaattgttctgttttacagttttgactaaaggactattccttctgtatttttcttgttttgtttataattcaaacactgtaattataatggagttgcttttataatagagctactaaatcattctgccagctgatgaaaactaaagggaagggctcattttcttgtgccataactgttaaggccaacttgggtgtgttgaggctgacacaaactgggaatcaagagctccagatggattttagtcttgcgaaatctctgcttcagtgtttgcattttgtaggagtgttaggccttatcatcaccgcagtgtgtgggttaatcctttctgacagaaatgcccttaggctggtagggtttctcaatttgtttatatggtagctttaaaaaataccaatgcccatacagaagaaatcagaatccttgggggtaaagtgctttaaaagccccaggggattctagtatgagccagggttgagagagactagcctaaatggacttgagttgttcagtagctcaagtcaagactaatcttaccagctgttatcatcaaccctgctcacatcaactaatgttttctaaaggcttatacaacctttaaggtttcagaaggttaaaaactctgatttctgggctccacttagatctattaaataagattctttggggtcagggcccaggaatctgtttttaataagagctctgggtgattcttatgtactaaggtttgagaatttgctaragaagcaagatgatatttataagtggggttcagtgaaacttcagaggagagtttgcaaatcacagtaaattgagggcaaggttttttatgctttttaaatggtagtgattttggtacattcatctgggtctaactggagtcatgcatggttataatagcatccactttatttagggggaaaagacccccactatctagtgccatgtaagacctgggaatacacacatattctattgcctctttaatctttaggtaccaggaactaatgactagggccaatgtatttttcaagggcctatgaaaatattcagaactaacagagagagaaaaactactttgatttcagtgtatgcagaaattgcacaatctgaacaatgtcatatttaatgatatgtcaataaatgaaattttatgctmttgtgattaattactaaatgtaatagttattaaaatgtctactcttagagacattttatgagttagcttttctcagttcttaagaattcctgaaactgcatgttgattactgggaaattttaggcaatttaaaaaattaaattaaccaaattatacataagcaaataattttaaatgcaaaagtataaaaatatttttcacagatctcacatacaaaaactgtttcgtgtatgttgaataaaatttatagaagtccattggtttggactgaactactgaaccaagctcaacagtccaaaccaaaatagaattactcatgctgaagttttggccaccaagccaaaaccaagtttttcatctgaccttctaagaaatcaggggggagaactagtagccaaatcctcaactagaccagttgtagccaatatgataaggatgtccctctgctttaacctttacaaggaaagtaacttggaaacaaccaatttgcttttggttctttgtttctgctttcttcatcccttttccagctgtaaaggaaacctcctctgctcagctcattggaacactcattcttttttatacagtgaggttttgtctgattctagaatcacaaataaaagccagttaagatctttaaactaaatttgtttcaatyttgccttttgacctgtaaatatatctgatataatatggggttgagcctctcaaagaaaatgaacctaaagcctaggacggccatgtaggtatttccagactacacatctcaaaattaaaggatatttaattgtcctagggttcattctcatagacaagattatcaaaatatatgcataatgaaccttcaaaagatacagttgaaataaaaaaattagtgctcacttttcctccttttaaaaraaacaaaagtgtaaaagaaaaaaatcaatatttttagccacatatcacactacctttgaaagcacataccttacataaaagttgggactattaatgagcatcagatgagaatgacaaggcaaattgcatgctacaactctggctcagaaaattacccctcagcaattgcagtcatagtagtggatgccactggaaatctagtgtctctgaggtcaatagatgaccagaactgaatatatagttttaaaaatgttcatggcctattcacactttggattggactgcctatgaggtccccagtttcaggattctcctgatccayggaggatgattcctgctagtgaggtctttatcgacatcttatttaaggtacacctcccctttctttatcttagcctcttttttcctttytttattttattttttttttagtaaaatttgctgtagttgtttcatttgtctatttacctttctttttcactgtctcctctagaatgtaagctccacgaaagcagaaaccatggctgtacttctttaccaagttaatcctggggacaaacagggtggtgacaatcgatcactttgcttttgccagcaatgatcagtcaggagtggcatgctattaggaacaatattataaatgctgaactggtcaggaaatattttattttactttatttttgagacagagtatctctttgctgcccaggctggggtgcagtggcacaatcatggctcactgtagcctctacctcccgggctctggcgtcctcccacctcagcttcataagtagttaaggccacaggcacatgccaccatacccagctaatttaatttctttttttttttctttttttttgtagagacagggtgtccctatgttgcccaggctagtctcaaactcctgggttcaagcaatcctcctgcttcagcctagaaaatattttagtacattccttttaaacaggattctagttattaataagtgagtgatggaaaggaaactatttgtagttcatgtagacctctcttacctccaccagcatccaaaaggggggaagaaaatccacagaaatcagcttgtctataaattctacaacttctagatgaataaaatagttaattgttcacttgaaaatgactactttacacttttggagagaggcctgaaaatttcttggcaatacttcaactgattaataatttagaacaatgattgactggagaatggaagtggcgctaatagcctctcattttcctctttattatttcagacaaattggtragtcatggtggaggtgtgggatgtttctgggtcaactggctagaagctttaaattaaaaatgaaggatgatatttgatcttaattttctaagatgttggcctcaccccttgatggtacgagatacctttgcgattgcattgcttctgatgcttaatccttctatgcactcctggcaaagtctatgtgaattacagcaaacttttactgtgactctgctacgtgtgccatatcatgttaagcactggttgggataaaacaatgggtttgatgcaattctaaccttaagtagttaaaaggtctggcaagaaagacacatatgactataaatcatcctcctaccaggtaaaaagtgttaagtatcttaagagaaagatatgaacaaataccatgggagccattagcttayggtattgatgtgaggaatctgcctaataggaaattagtgatttaaaacaatgtgaaaaagtcaaatcagtrcaaatagtgtatgctgataacagcaatttgaattatgaagtgactaaagaaggggtgctggcatgagaagctggttcagagtttcagggctacataaagctgcaggtccgccttcaaaagaaaagattcagataaattgatcctagaaggaccaaagtgagcctcctcctagaaagtgcacaggagtttagctgggaatttgcatttgttcttgggagaggcaatggctttaacaggagacagggttgtggctgctgcctggggtgctgatgttttcctgcctctaagagagaagcaactgagccccccaactgaatcccacaaattccaaagaaagcttaatttttcatctagataaaatagttgtgtatttgagtgccacatttgtttccattktctgaacttttgctaacataatgaagatctggatgccaggacttaaggagcaaaggcttgtggacttcctatggttaagttcctcctatgcacttaagtaatatacagaatattcatgcttctatatgtatatgtcattgtgatggcctgaattgtattcccctgaattgatacactgaagcctgaatccctaatgtgactgtatttggagacaacttttaaaggtaaccttaattacccctttaaaggtaggcagggcacggtggctcacacctgtaatcccagcactttgggaggccgaggtgggcagatcacgaggtgaggagattgagaccatcctggctaacacggtgaaaccccatctctaccaaaaatacaaaaacaaaattagccaggtgtggtggtgggtgcctgtagtcccagctcctcgggaggctaaggcaggagaatggcacgaacccaggaggcggagcttgcagtgagccgagattgcgccactgcactccagcctgggtgacagagcgagactccatctcaaaaataaataaataaataaaataaaaataaaaataaaggtaattaatgttaaatgaggtcataagggtgggacctaatccaatgcaactggtgcccttataagaagaagaagaggagatactaggggaggaagcacacagaggaaagaccatgtgacatggtgaacgaaaaggcagccatacgcaagccagggagagaggcctcaggagaaacagaatctgctgacaccatgatcttggactttcagcctctagaactgtgagaaataaatttctgttgtttaagccacacaatccttggtgttttgttatggcagcccaagctgactaaggtggtaattgacatatttctttgatagattttatttatgagcctcagttgatgacaagttaaatacaactcttaatttgggccaaagcaactatgaaagtccttaagaaacgattcccccatcctgcctattgagtaatgcccagcataaccatagtataaagctactcatttatgcagagcaattctttcatctgaccatctacttctttaccaaatattcattgagtatctactatgtgctagttactcgtggattatgctcaaaaggatctgtcagtctagaaaaggaaatataacaggcaagtaaaacacagtcatttgtttgcagaaattgccatggccatgccaagagtgcagggattcatggcagctgggatggcagagaagtctcctcggaggaggtggcattgaagaatggttttggaggatgatgagatttagtcatacagggctgtgcaatggaggaaggacagttgagaggagaaagaatggtaaacaaaggcttagaggttgaatctctagaagtttacagggaagcaagaactttgactaaaatgcagcttatgcaaagggaaattttttcttcataaggccgagctatctcagactcaaagagctttcataacagagtgatgatatgtcaggcattgtcctatgtacattattacattgactcgttcctactcgtagtaatgtaggtgctaatattctctccactttatagatgaagaaactgaggcatagatgggttaaaatacttgccaattactaatgaatggtggagctgggatttgaacctaggcatcctggctccagagcccttgcttgtacaaaggaagcctgagagcatctgaactaaagtataaggggaagtactgggggtcgatagatttgcaaatggtgcaagatgcggagtttcaagatagtaggcaattttgtgtgtttccttgagcaaagagaaaagcagagcccctgcctcctataaccatgagggggatcgcagtgcccttgatcacttttcagcaagttagccgtgtttgtagccctccgtggagctaaattgttggtgcaatgaaacaaaagtgtttttcaggctctctgctgccatggttagcctaggacagggttatgaaaggagcttttctgcctccgctgccttccggggttacattcttagtgaatctactgcctcaaaatggagcttgttagttgcgtgtcatccgagggtggcaattagttgcatgtgtttggttggatgccagcccctggggtgccagacctcagtacgggagccactgtttgtcatgaatcagtctttaaataaaagcaagtttttaaaatggaccatgctaatttggattttgctaaccycttctgaagaaggcttggcctgttcggtgccagctggctgagttggcattcagcgagaaactgggtccttaccaaaaatcgcattgctcccctctccctctttgaggggaaaatggcagggaggagctagctggcactgcaaaacaaggtgacaccaggggcagggacagcgtaggaatctggatgattaaagggaactgaagtgccatgatatccccgctgctccccaccttagaaaagaaaagctgcccctctttctccccactcacaccaccctcagccacccattcagtaactttccacataaaaggctttctcatccaattgcttatacactgcaccttttatactcttccaagttgtccttaagggattatcactgcagcttttaatttcccctagaaagagctgaatgaacgtgaatggggcggaagagtctttactgagaaagtgtcccccatcccaaaatgctcacaaaacctctaatcacgatggaagaatgccatcctgtttttggcggcggctggctaccaatgcactaatgcacagtgactgtccgtataggcggtaatcacgaggaagcatgttgcacacacaactcatgctcacagatcatgcggtgcacacaccaggccctggtcactttaacatggtgctttttcccattaacaaagagcaaccccaccgatttcagttgtgattcttgaaactcagccctttgcccagtaagtrctaaccggaagacttgttttcttacactttctaggtggataatctgatcaccasaaatggcaagggtgatgccatcaacagttgaaaacagaaactctcctatttatttatttatttatttatttcggtttggtttggcaaacatcccattgtctccaaataggattgcttggtattgggagagcagccttgtacataggcaagacagaagaggaattttaatcagctttacatttgttttgaagattcaggaaagatggaggctttatctcataccaacgtatctatgccatagattgctgggaaacaagagttgtcctggttactaacgtagtgtacattaagtttcctggaatttttttttttaagcctgtttatttgatgctggcacctctgttcttctgaaggcagcatattaggtttactaataaatgacacccagttcctaagagactcggcctaaaagctttcctgacagggcaggaatttgtttcttttttctttgcttttattaaaaaacaaaaaacaaaaaaacaaatattgaggcaaaatcgaggatgaaggacattttgaaaacttgagtactgtaaatagttttaaggaagatttcatttttccaaaactacacattttgcagtttctttaaatgcccatttaatattttgggtcttgccagggcaacgtgttgcttttacgaataagagccaataatgagcccatggagcctttaatttatgatgtatctgacagtatagtggtggatctgataggggatgcatgtgattatgtctgcaagctgaaaataaagtagctggtatttgttctgaaaacgttctgagaacaccctcctgttaatggcccatggcttgatccagcatctggtaaactaatagattgtcatttttaccatgaaagcataaatcattaatgattccacaaccatttgagttcttctctggtctagaatatgccaattaccatgaaattagtcctattagcaacatgattgaatgatagtaacctgactgtaacttgttggcagaaattctctcataatgacagtaatgaactgtgcatttgagtccttgctgggctctgttaaacaggaaggttggatattatatgtttctaaccccttatgaatgatacttcttaatgattatgtgaattgaaggaaatgttctgttttgccgatttctttcaatgtaggaatttatcatttttacttaatttgttgggggarggaatcactgtttgccattaaaaatgttgttcagggactactttgtgctacacacatattacgatcatcaccagtatgtatatagagcctaccgtatcaggctttcatgagagacaacactggaatttttaaatgaaacattccacacataatcatcaccaaagaatgagataataccatcagtgtcagggaccctgagaaaaatacagagagcccaatactgtcataagattaataagttaattttcatttctcttttgcataaccttggtctgtaaggtcacatgacgtgcctaactgaaaatgtgtatcaggcagatagcccaagacacctaagatgagccaatgagaaggccaggagccaatgtgaaggccaactagcccccactggtagggcttctgtcatgcatagcagtaggacaggttatttaattctccaaagatctagggcaagtagttagtggattggacacttcctgtgacacatctcacatcctcttgtctccctttctgtattagggctgtcgctgtggaaaccaggttagggcaagtgtgacctgaagcctcttgcctaagtggcattgggcatccctattttcatccctattttctaccaccttgggagtgagactggcaacctggaagtataagagagttattaacccacggaataacccctgactggtggggactgggagttggtggataaataatctcttccatgccttgtttagacatgtctgaagcacattatacatatacatctgaagcatgtaagttttctcggaagattccagcaggttgagccctaggtgcctgtagttgttatcgacttgagaatgtatacttatattgtatttccctctgtagaggatgctgttggtcccctaccaagaccaccattagtgggtcaacacacccatgccccagctgcttagagtgttggatactaaggtctcacagctgaactcatctcaggagaattaaccctctattgagggaaatgaacttccccagaaataccttagaggatcccctatgcctggtcaagggcagtccacagccaaggactaacagaagctgtcaaggggaataactctgtggtgctgttcatactccatactcttgtccatactctgggtttgggccatggctggactccagctgaagccatatctttccgtggcttcttccctggcccatcctactccctcatttccccataggtttctcctgagggcactatttcaatcaatttcttgtacaagygtacccatttcagagtgtacttctagggaatctgatttaagatacccttttcccctgttttactctccctcgttcctcaatttgattatctagggttcttttcccaaaataaactacctagttgtaagcctttgtttagggtctgctttcctgagtgggatgtaagagtcagatggggaacacaggctaaggctgccaatgatatcaatatgttttggggttccactccatgctgctggctggattaagtgcacatggtctctactacatacactatggaaggaacttagatttagaaagaattaggcaccgtaagatgatactaaagtgaatgattcagataataaatgtagaaatcaagacctattatttggggctgaaaagggtaccaaagacttgttgagagaagtgtgtttgaattagtgaaagaaataaatatttgagaaggcagagagaagtgggggaaggaaattcagcttggaaatacagcatgaataaaggatctgagtgggcttgaaaatcattagttggggggaccctgatattgctatcactctgggaataaaggcttcatgctagaatggttcgataggtccagaatgtgcctatccatttcatatttatttgttcaacaaatgaattgatattcatttacttttttaacaactatcttttgagtatgtatgatttccaggcattgtgggcactggaagtgataaacaaaataaaaattatcctggctctcaaagagtttacagaataggaaatatacaagtaaacagataaatatatagaattacaggttttcttcctatggctgtgaaggaaattgaacaggatgcagtgacagaatatagcaagaatcatatatrttagactgaatggacttacaagtcttcttggaggygaaaatgtttaagcagagatgtaaaaatgaaaaaagtagccccgaaaaaggagtagggaaaggagaaacactgtagccagatgattgcatgtgcaaaggtcccgaggcaagaaatgcctcaatatgttagaagtacaataaaaggccagataatactgggcaaggaaggaagtgcacaagataaagttggaagatagggaagaacaagattttagagggcatcatatgttataaaaaaagactttgggccaggcgcagtggctcatgcctgtaatcccagcactttgggaggctgaggcaggtggatcacctgagggcgagagttggagaccagcctgaccaacatggagaaaccctgtctctactaaaaatacaaaattagctgggcayggtggcacatgccygtgatcccagctacgtgggaggctgaggcaggagaatcgcttgaacctgggaggtrgaggttgcagtgagccgagattgcgccattgcactctagcctgggcaacaagagcgaaactctgtctcaaaaataataatactaatcataaaagactttggatttaatctggaatgtaatggaaaacaattgaagagcttttaggaaagaggtgatagtttatgtttttaacatattaatttgttatgtggaaaataggttggtgagggcaagaatagatatagagagagcaataaaaaacctattgcaggctgggtacagtgggtacagtacacctgtaatcccaacattttgggaggcygggtgaaatcccatctatactaaaaatacaaaaactagcagggcgtggtggtgcacacctgtgatcccagctacttgagaggctgatgcacaagaatcacttgaacctgggaggaggaggttgcagtgagccaagaacatgccactgcactccagcctgggcaacagarcaagactcagtctcaaaaaaaaaaaaaaaaaaaaaaagctattgcagtagtgcatgtgagaatagatgattgactggtctaaattagagtcaatggatgtgcactagaatttactagactgtaattcaagacagtagggcctttgtctcttgatcactgttgtattcaggcctacatctaaggtttrtggggcccagggcaaaaaggaggccatataccatctgtctaaatatttaaaaattaacaaatccagctagtaagccattaaagaagtgttttttatcctctgccatgagataacttttttaaggacaaaatctaaatgtataggtgaagccctagtttttacgtgattgaaaatkgrccaaatatcaaagacaacagctcttgattattattgtacatgttctgttattgggctgatgacattttagtgagttttttaaaagactgaaatatttcttaaattattatatatttattccaattaagttattttttctcatcttcatttcagtaaaattgtcatgttgttataatcaaggtggtttttttttaagatactttttgtctattggcagttatgatctaatacagggatctgcaaactaaggccccagggccaactctagccactccattcacttatgcattgtctgtgattccttttgtgctagggcagtgacagagaagagtcgttgtaacagcccaaaatgtttactgtctggttctttacagaaaaagtttgctgatccctgatctaaakaattagaaattaaactgcatttgtatttaaaatgtatacaatttgaatatattttcctcaagcatataaattaattatacattgaaaaaattaaaattaatttttaatgtttttaagaaagtcatatttcttgcacaatattcaaaattatacattagaatttaaaaagcaaaatgaagaatgggttagctaataaaaaacatttaaatcaaacatttcaatgtagctggatttttatgacactttaattaaatcttattaaatattttataaaaataaaacaatttctagttttgtgttcaatgcccatctagttgccaatgtgaagacttggtatcagatttcatgtatgttatgttgcaacctaaatttaaagatagcatcaatcgtttaataatgcaaaatatgcctaagttactatgtccacagctgtgaatattgcctgaatttgtgagacctctgaactatgaaatggaaccagcagattctgatgaaagaaaatagatacggtattcagcactaactactactactactactactactactactactactactactactactactactactgcaatctctttatgccagaatctgtcttaatcatgaattaatttctctttttcttatttatgcctttccactgctcaaatcctgtccctaccacaaaagcagtgtacatctctattgtctgcagttttgcagttgccatatccacaacccacaacccttcctgacattcagattcagtcaccatttcttcaatgaaagtgggcaagagaggtgtagaaacattttcctagggcaattacatcatttggcacaagagtaagagttactggttgtgtctatgtgaggcaagcaccaaatcctgagccacagaagccctgatgtgttttctaatcacttcacttatggtgattagaaaatgcaaaatattttgcaaacaactttgaaatatgtttgtgataggaaagcccctctaaaatatgtggttcaaaatatatcaaataataaarcaatgtaatacaaacacatggcctttataagttatgaagaaattgcaggaaatttcaagaagctgaagtacaaataaagtccccattacctgattacaatgcaataaattagaaatcagttttatcaaaaccttacaatctggatattttaaaactctttgatactctgggaggccgaggtgrgcagatcaccagaggtcaggagttcgagaccagcctggccaacatggtgaaacgttgtttctactaaaaatacaaacattagttgagtgtggtggcacacacctgtaatctcagctatgaaggaggctgaggcaggggaattgcttgacccaggaagcagaggttgcagtgagccaagmttgtgccactgcactccagcctgggggacagaccaagactccatctcaaaacaaacaaacaaacaacaaccctctttgataaacaactcttaattcaaagaaacattttaaacccaacttgaaaaatatctagacaccattgataatgaaaatataacacatmtgagctatgggctacagctaaagcctcgcttagaagaaaatgtatacagcctttaacacctgaatatttaaaaaagaataaaaataaaggaattaygcatctgacttaagaaaggracagccaaaaaactggaaaaaatgcagaaagaactaaataataaagataaaaataagaaattaggttttctaatttaaaaataaatccataagaawcataaataagctcaaatactgtctccttgtgatatggtttcgctgtgtccccattaaaatctcagcttgagttgtatctccccgaattcccacgtgttgtgggaggkaccyagggggaggtaattgaatcatgggggctggtctttcccatgctattctcatgatagtgaataagtcttacgtgatctgatgggtttatcaggggtttctgcttttgcttcctactcattttctcttgctgccaccatgtaagaagtgcctttcacctcccgccatgattctgaggcctcccctgtcatgtggaactgtaagtctaattaaacctctttttcttcccagtcttgggtatgtcttcatcagcagcatgaaaacagactaacacaccttgaaaacaatgccaagcaatgaaattcacttactcaaaaagttagggagtacaaaaacaaaaaatggaaagcagacagtcccagtggctcaagcctataatcttaacactttgggaggccgaggcagctggatggcttgagcccgggagttcaagaccaggctgggtaacatggtaaaaccccatctctacaaaaaatacaaaaattagacaggggtagtggcgcatgccagtagtcccaactactcaagaggctaaggtgggaggatcacttgagcccaggaagtttaggctgcagtgagccctgatcgtgccactgcactccagcctgggtgacagacagaggacagagtaagaccctgtcttaaaaaaaaaaaaacaaaaaacaaaggaaaaaggaaaaagaaccatggctaaagaaattaaaatattcaaaggagaacttttgcaaaagtaactgaaaatcttcaaggaatgtattttttaaacaggtaaataagttacccaaacatattcaacaggaaagagaactttaataacatcggaaaaatctgaagcagttatcaaagatcttaaaaagccacaggtctttatgctttcagaagcaaataattttgcatttcaaggaactgataatgttaattctatttaaaaatgaaaactggtaaaattaattttatatctgcataatggaatactgtgaagtcrtcagataggatgtggaggttctgtgtatagttawggaacaatctacaaaacacatgaagtgaaaaaaaagcaagatgcagagcattgtgtctattataccgacatttgagtaaaagtgtgtgtccttgtgcatatgtgtatgtgtcatacataactaaaggaacgcaaaagcaacggattacaatgattgcatctgggggaagggactaggcasctggaagacaggtagagatacttttttactcatgcccttttgtactttttgaatttgatacacagtacatgtattacatagtcaaagaattataaaagtaaacaaaattgcccatagcacaaataaagaaaaaaactgccagtgtgtttttatgaagccaatgtaatatggattccaaagtctgagagagacagcacagaayagaaaactataaatcaaactcatttayggactcattatgaaaatttaaagttaataaacaatttatcagattattaaaatattagccccatcaaaagaggtccttattcctcaagtacgaaagtatctcattaataagcaatgtgttaatatactcttaactactatcctgcactacttctcaagtggcagagctatgtgtgaactgtcaatccatccataaatagctatatatctatctactgcattttagcaaatctaaaatgctgtcaagtataagacagcctatttcagaaatgttaaaatgtggaaaactgtttatctttaaatcaatgaagtgtagtatccatccatccatccatccatccatccatccatccatccatccatttttccttcccttccttcctctttgcatttatctgtctaatctatcatctctctatttagaatatgtatatagatctaatataatatctagaatacaagatatattctttagtgagaaaaagcaaggagtagaacagtggaacagttgtccaatctgcatatttttaaaaagaatgtttaaatagatacatagtatatgtgtatatttttccttagaaggatttatagaaaactgtaaacaaaggttacctttggaaagaaggactaggtgaagggtgagtggaaggtgggggtgagagaagggggacttttattttttttctgcactttttgarttctccaaccttattctaccctcattttgatttttggaccatttgcttctttgctgtagcagaaggtgtcggagcactgccctggtacctttcaacatatctgtgagccctgccccagcttctgtgtatttaccttccaatggctgcttcggcaatggtctttgcaggaccaattggagctgctggcttcactaggtctgctgagagctggaagtgcttggagtttaggaacccccaggatggctcttagctgcagagtgattggtgagtgagagtgaaagcccagtttccttgcctctggtgggaaaacgtccctcagaggattctaccctgaatcacaccctcgcttggcttcttgcctttccctgttctacttcttgccacgctgtaagcagtttttcttggaagcccttccttaagaaacccccgcttgtttgtctgggcgctatggctcatgcctataatcccagcactttgggaggctgaggcaggcagatcacctgaggtcaggagttctagaccagcctggccagcatggcaaaatgctgtctgtactaaaaatagaaaaattagctgggcgtggtagcaggcacctgtaatcccaaccactagggtggctgaggtaggagaattgcttgaacccaggggttggagattgtagtgagctgagatcttgcccactgcactccagcctgggcgacagagcaacactctgtctcaaaaaaaaaaagaaaaagaaaaagaaatcacttgttcatggtcttctcagcatcttattctgagacttaagacattgtgacattgtattccactttgaatttatggatatttaaaaagaaatcatgaatgtcatatgtatgtaaataaaagaaataacatactatagaatcaaatgatactgagacaccaaggaaactggcttgttcctaaaactccaagctagaactggctttcttccactggacattcctgtgtcttatggtcacaagaatcttttttaaaacctgacttcagcccctgctttagtagtttcagtaaaaggatacctgcccaccatcttcatcacagccattcattttcctgtacttacttgaagaccattattcggctactcatagctaatgtattacacaagttcttaacaacttctggggctcattttgacaaaacacaaaccatcaattctcagtaaaaaaaaaaaaaaagaaattgttttctcgaagggcagtctcaagatggaattactaatggctgtaaagaactgtgcctactttaaaagggacttgtattgtgattcctcagtagctggcctcagtgggcaaatgaattaccaaaaagcactttgctcatagattgcagtggtgcctctgagtccagagttcattgtcaaataaagcatgtcatttgggtgcagcatctttgcatttttaatcatgtttgatctttcagtcgctcactggcaacaggtctgctggttgtcagtgtgagccagcaaggctatgttgcaaatgtttaagctcctcaggcagtttatttatgctggtaatattcaaagtatttattatcatcctgtctttatcctgaatgtgtgactgcattgagagccataaattgctctagatttgagtggctgtcgacagcatgattttaactgtaacatattctctctgtgtaagtgtgtgtgtgtgtgkatacacaactatatacatggatatttatttttacacccaccaacagggtaatttatagcataacacacatacacacttacaaaaaaagccctctcctgtcatcaatagcggagtgttttctctttggtgtagtgctggctattagaggagaaaacggtgtctaaatcatttatttatgcaagaggagtgtgaggaggtcttgagcaggaagccatcctcattggaggctgcttctgctgccgtcagggcatctcccaacagcccctgaaagaggttgccagatcctctggaccactgtgcctttgtctgaaaccagcccaccatctgcaagatcctgggaactaacttgttagtaactactgatagggggacaccaattttgagaggaggtgtgtatacaattgaatatgataaaatagtaagcactgcttacmttccacttcccctcctttttacatatgtctttttatgaggacactgtccattactgatagactaygttagcattcactttgcttttttaaagrgagaagaagatttagaaaagtggggcttaactggggattggactgttctcattcatactggccctcacattattcagagttgacaatttgttaacacctgacagaagacctgaaatctattttttagctcatcaagttgggtgctgggtgcctcaggtgtattatattgtttctgcattttgttgtgttcatgttctctgtcctgtaagatgataagcttctggacagctggaatgatgctttgtatttcacctgtctttccaaagcatgttgcatgttctaacagagtactggttcattgttgatgtgaaataaatacttcttagttggagttcttccaaggtagtcatttagcttatgcttagcccaatcataggaagtaataatggtcaggcagaaagttttagttaaatgtttattaagtagctgagggaattagtgtacattattagcaaggtttttataatttaactttttcttctttgagttgctgatttatgtagcaagatactttattgagcatacattggtgattttcatgttttttttttctctttagctgagaaacccttctttactgggctccaatgtggagaaacaatatgtacaggtgaaaaggttgttgctttgtttgaaacaggggtgaaagataaggggccagcttgagcagtcttttcttcattgttccctcttctctcctactctattttcccaaacactcctaaaccaaatggccagcaaaggaccactagggctcctctgaatatagtttataaaccatttgtctaaaaagagtctttgagtgcattattacatttggttcactattttaaaaaacagacgattttctacagcaaatttagttttactgaaaaactgagcagaaagtacagtacagaggtttcccacaaatcccctccctttgcccacagtattcattatggttaacatcttgcattggattgacacatttgttataattgattaaccaatattgctacactattgttaactgaagtcatccctcgtttacattaggactcaatcttttgtcatagtcctgtgtgtttggacaagtatgtaacatcatgtatctctcgtagtatcatacagaatagtttcactctcctaaaaatgcccctgctccatatattcatcctatggttcaatatgttttaaggtacattaatgttcagaggagtggtggtaatggaatgtggtttgatcctatggaagtttcgctctatcctttcattacagttggaaaaactgcaggtttctgttccctaaaaggggaatcaggatttcaaattacaatcatgatcctgttgtgataactcaggagactactgcagcttttgtattttggaagagttgaaaatttatcagtgaggctaaatgccaaggtaaatttaactggagcgagtgatgccatgcttatttagaatatgttgtgacatatttgaatctaatgtgtattaatatataggcaaaggttaattttgactattttcatgtccaaatctagacttgtccttccttcactgatttgtaaattccgctttccttacttttgggacctgccgttgactttggtgcattgctaattatgcacacaattttagaacaacactgacaatgaatacaaaatattaataaaccaacaagacagcagttttcaagaatcacattatgtacacttactgcctaactgaccttttctgcagttacttaaatcttttaaaaatccatttaatttcaaagccagagtattagcctatttatatgtaaattgtctttaattcatgcattgatttaaaagactaatccaaaagatcttttaccacaagtgacctttttgacgctacacttctgggaaaactgtgaagtggtttcttggtgacctcacatccacctgtggtacaacacatgccaactctggtctgtataaataactcacaattgtatagttttaaaccaacattgaattattaacagtataattgttttagttactatttccacaggaccatttacagggatgaattttttttttccttctggtgtctttctattttcatcctcaaccaacagatctaattaaaagctttactaagaaatgtctgttattcaagggacagagtcaggtgtttaatagttactgtctccaaagaacttagatgtcagagaagcttaaatttacattgctgcccaccatacagacctgagaatccagagaatcttagactcttaggaaagcaaacggggcaggttaaccttggtattttgtttgtttgtttgtttgagatggagtctcactctgtcgccaggctggagtgyagtggcacaatcttggctcactgcaacctcygtctcctgggttcaagtgatcctcctgcctcagcctcctgagtagctgggagtacaggtgtgcaccaccatgcgcagctaattttttgtattttcagtagagatagggtttcaycatgttgcccaggatggtatcgatctcttgacctcgtgatctacccgccttggcctcccaaaatgctgggattcaggcttgagccacagcacctggccaaccttcgtattcttgttgtgctctctctctcctctgtctctctctctctctctctctctmtmtatatatatatayaywcacacacacacamtctctctctatatatacatatctatatatayatatwgatattcaactctcatctctctctctatatatgtatatattttttttcaactctcagttttctgcctgtgtttagtttaccttagggaatgtctttagccagtgtttcacaacaaattatctttcttctggggatacatatattttggaattgtctagtccctgttggtggtggctgaaatgcaaagcattttagtttcaattttagcctatgtaaaacatttgaagtaaaattgaatgtgccatatataatatatatttatatttgtgtatctattatttctctgtcaggatttttacctgaggtacacgataggaggccacaaatgcccagaatcttatgcaaatgtgtatgtgtatacatgtatttatttgcatgaagtgtcaccacactgaacaattctatggagtaggaatattcacttaggctatactgtgaatgycaacaccctgtctcctgccctggagatgcatagcacagggctgtatatatgtacatacctccctttgtggcaamcctcagcccctagtatccacgtcttccttaaatttttacaacaggtgtataacaccaaaatggttaaaaactactaaacatacatatatacacatgtgcatgtatacacacaaatatgtaaaatatatatacacatatacattctatgtatatatatagttgatcctgatttttcataggaaattgttgtataaagtctccacaaaygctgaattagcaaataatgaaccattgcccctaggggaaatccagggttgagttcctgagagcctctgattacaatattttttttgtttttaagagatagggtctcactctgttgcccaggctggagtgcagtggtgcaatcatagtgcactgcagttcgaactcctgggctcaagtaatcctcccaccttagcttcccgagaaaccagaactacaggcacgtgctactggctgtttcttcacaacatttttgttaattgattaatatgtaaactttktaaatgtttacttttatttaaagatgcyttatttaacatatagctaattcattaacactgaagtcatgggacacagcctgagctgtttaacctgagcctgaatgaagcttctatcactcatgtttcctctgtaaggcacatcatattcttcttgtactcaggaacaagagacagcacttcagcactgttcttttggggccattatgtacaaaaatgcaaaagaaaacccaccccaacaacctggcatttaatagatcagaaaaagacccttgtttacagtatgagagatggagcaagaaggtggagctttgctttgttctgcttcacttggggaatgtacatgttgggtgacaaatttttcacttctctgtgatgcccaaaaatgaccacagaaatgtggcaagtatcgatgttgaggttacaaatgcattttattgagtgggcaaattcacaaacacagaatgcacaaagaatggatgccaaccttatacacatttatgttcacttacctgtttcatgcaaggcatatgcaagtgttggtgattttggggtgaacaggcagacaggaacactgccttcatggagcttgcttgcatactgacactggacacagatgttaaacaattaattacccaaataattacctaattacaacagtgatccctgttctagtggaagggtatcagacactattagagcatgtgacagagtatccagcccaggatgaggggtccaggagagcttctctgaggatgtaacatttgagcagtgctcagaaggatggataaatatgcaggaaaacatctgtatgtgtaaaaagctggagcagggattttatgctaatttgttttccaatcccttgctcttctcttctaggtaaagttggtagcatgtatataaatatattttttctaatatgataaaaatttctctttatacccacatgggtcattacttggaagctgctgctctctatcccttccttgggaattgtagctagaagaagctgacaaaataatatatcacacaataaggagtaaaatatttaaggatggagacaccctttctcctggccaacttctgttttgttttktttttttttctttttgtcttatttccctctttcctgcttcttttcctccctttcttcttttaatttgccttcctccctttcttcttttaatttaactcactagattgaattgaaacacaagttttatcttcttttatatactcagatttagtcatatatggatgtggcttttgatcaaataggaaaatcagcccattcattcattcattcttcattcacaagtatttctcagatccctactttgtgacaggccctgtgcaaagcactggtgaaatacaaagatgaaaaagacatatacctattcatgcttatcttctcttagatttgtctgaaacaccactaaactttttagatgataattataattatatataaaagttaattagacacttattccatgccaaggactgtgatagcattttacatgcattatcttcacaaggttcctgtgaggtacgttttaggattatctccattttagagatgaagtaacagactcaggtagggtgaaataacttatttgaggacaggtattgctaagtagccgagctagcatttgaaccatctccattcttaagcatattacactgcagtgcttcctgaaatccttatgagtgacttaataactttcaaaattttgttttaagatatcaactaaagcaagattataaaacttaaaagattttttcatttccataagttacttattggttatggccttttttcttagtttcttgccagaaaatgcccattgcctctccatgccatcttcccagttttataaatgagaacatttaggcaccaagtagttaagcaacttggctaagttcaagttgttaggaagaaggacgcctgggacttcagcccagggctgtctcattttttactatcaatttctaaaaattaggcttttaaaaaaatattgcttttttattctgatttcaatactaattcacactgaatgtaggaaagttagaaaacttatacacatgaataacaaaacatgcagacattggattcttctgtctttatctctgtagataatctctttgttactaatcttgaaaagtrctctctctgtgtgtgtgtgtgtgtgtgtgtgtgttttctgtttgttgcatttgagttagctttatttctagcatgaagctgtttgctcctggagggaaggaatgatttcatttaattctctgtctcctacagcacccatcttcttactaagaatatggttggttttcagcaaatacttgttgctttaagtggaattgaaatcacttactgcccaggatactctttttgccaccacaggatgcagcaatacaatcccagaggcccaagtcagacagggaatcttggttttatgtcaatttcaaattttgccccctgtgcctggggaatagctcaattgctgtcyttttctctgggataaaacttagaggacaccaaggtcaactttcagacacagcagagagccaggctgcaatagtaaataaaccctctgcaagtccatggctaatatcagtacagtgaatgttggcaaaatgaatccagaggcacttctcttcgtgggagtttaatatactctttgcctgtggcatggtaaatgggcccatggacttccaccggyctgcagattctatcaccacaacagaccactcctattgttacattttctattgtcaccaaagatcttaatcaccacagccaagggctagtctcagtcatcactttcagacctactccttcttcttaaaattatccttttggcctctggactataactctgtctctgcttcttacctttgcaactgttatttctttatcccatttttcttatcaagaattctagctttagttatctgctctgtgaggaaaacacctgagtccattccagttayacctctggcttctgttcagatccccatctttctggtggacaggggctggtaggggctcttacctccctgtgtttgtccatttgggctgctaaaacaagacaccttaaaccaggtggctcataaacaacagaaatgtctgtctcacaatgctggaggctgtgaagtccagatccggtgtctaatgagtgcccattttctggttaatagaggatgccttcttgctgtgtcctcacatggtgaaggggtagaattctggtcttttcagcyccttataagggcactaatcccattcacaagggttccaccctcatgtcctaatcacctctcaaaggccctacttcctcatgccatcacattgggattagatttcaacatataaattttgtgagggacacaaacattcagtccataacctcccctaggctttaagagatgaggggaagaaacatttatcagagcctggaaggaggccaagtactgtggctcatgcctgtaatcccagaattttgggaggccgaagcagacagatcatttgaggccaggcattcaagatcagcctggccaacatggcaaaaccccatctctactaaaaggacaaaaattagctgagtgtggtggggcacgcctgtagtcccagctactcagcaggctgaggcaggggatcacttgagcttgggaggcagaggctgcagtcagctgagattgtgccactgcaccccagcctgggtgacagagtgagactccatctcaaaaaaaaaaaaaaaagaacctggaaggaaaaagatctgggtagagcaggtcacctgagaacagccttcattttcagaggatggacacagctgtccggggcctcttacaggttgctcccaatcctggaatgatgtaactctcaccagggcttcccgtggacagaatgcaattagaagctagagggtgcaggagcctattggcaggtctatattgatcaccctcccaggaagagtcaggatgaagaaagatggggaggggatctggatggatgagcagaggacattcataacaaccactgggactgatgggcagttcacgacctgccaaagagtcactgaatattaaactcctgaggccaggggtgatatgtctgtttgaagaaaagtccatagtgcttttattcttttgtaaaatattaaggaaatcactgtactttggggtcattaagtaatttgactatgattaaatatccgggagaaaggggcattgggattagaacctagtcttctgagcccttgccttgtttgctctccccagagcctgtgtgctcccctgtgggttctgttaaagagccacacctgcatcatcatctccattttctttgttttcaaaccttatgaaagagacaactgttgatgaaattttattttaaaaccattagtcccycytttttacacagatgaatcattaaataaccaattagttataraagtgatttatcaggaaatatagggctttttccttaaaattcatttccccacactcaggtataaacagagaattacacactgggacaatttttacaaaattaaaaaatcacaagtacactgttacagtaaaccagggcctcatcaatcactatttaagaaaaccttggccttgttctttatccactgacaaacaaatttctatttcttctggcttcctcttatctcctttgtgggcatctgtagcatgtaaggccttactcctctgacctctgactacagactgtgggctatgttaaacttccattaacttatcgttgttcaatgcaaaaagccacactggtgttccttggctctctctctaatgacctattgaaggccctgctatggtttgaatgtatgtgtcacccatcccccagacaaattcgtatgttggaacataagacccagtgwgagcctgggcaacatggcgaaactgtttctacaaaaaaaaaaatgcaaaaattagctggtggcgcactcctgtagttccagctacttaggaggctgagacaggaaaatcacttgagtctggggaagttgaggctgcagtgagctgacattgtgccactacacatcagcctgggcaacagggggagaccttgtcaaaacaacaacaacaaaaaacaacccagtgtgataatattagraggtggrgcctttgaggtgattaggtcatgaggacagagccgtcatgaatgggattggtgcccttttaaaagggcttgggggaactagctaggccctttatgcctgtttacccttctgccttcgtccacgtgaggatacagaaacaatgtactgtcttggaagcagagagcaagacttcaccagacacttaatctactggcaccttgaccttggacttcccagcctccagagctgtgagaattaaatttctattatttataaaatacacagtttgtggtattttttatagcagcatgaatggaataagacaggcccacaggggaaaagtgtggccagtgctttggtattcatctccttgctgttttgttctgttcttcttatagccttacttaagggccgaaagaaaaggaacttgttgctagagagagtgtgtcagggatagcatcaagcattgtaactggcttctctcaaaaaagatagggttaatttttccactgtaatgatagtcccttaataccctcatctggtccttgcctcacagccatgttcttggatttcccttgaaccagctctgtacaaatttacattcccatcagtagtgaacaagggttcccctttctccatatccttgccaagacttgtctttcatctttttattattgccattttaataggtgtgagatgaaatggataaagaaaatgtgatatatatatatacacacacacacamaatgaaatattcttcagccttaaaaatgaggraattttgccatttttgaccacatgggtggaccaagcagacattatgctaagtcagctaagctagcaaagaaaaacaaataccatatgttctcacttacaagtggaatctaaaacaatcaaactcatagaagcagagagtagaatggtggttcccagaggctgggagtaggggaaatggggagatattggtcaaagggtacaatgattcagttaggagaatcaatggtaggtatttgaggtgatggctatgttaattagcttgatttaatcattccagactgtatacatatatcatagtatcactttgtacttcataaagatatacaactataatttgtctatattcaataaaatgaaaaaaatgaaataatttctgaacaaagtgatacaagtgatttactaccattggtgtcctacctctttcatttttcagccaagtggtacttcttgttattttatttgtagaagamcttaagcttccctaaaaggcttcaaagtattttatattgtgatattttcacaatagacttagcaaagtagagagagctagcaataggatatgtactttgaacatggggagattgggacctagagaggtcaagtgactataaatgtatccrattttaagttgaaaaatagtgaagaactgcaggttgatgggaccatttccagtgattcattatttctcccttttctatttttttaaaatattaacctccttactaatctctttcctcaggacttgatatgccatttgtcctatattgtcaatggttttctttgggtctatagtttcttcatgagtgtccatttgtgtgcttcttgactggtgcagaaatagtcttctagtttttctgtgtgcctttgggttcccagtatagcatagtttttggcatatggtaagctcattggtaaaagaatagtttaatgagtcaataagtgaatctagcacgtgtagatgctaaagcttgaaagtcagcaacactactattttttaaagtattaaactattgaaaatgggctaacgtgtgcattctccacttatstgctttggccttctccctcctggagaatggaggtgcactggaaacaattgttagttgttggaggtgttgcaggacttttccttagttcagctaaagagagggtccttgtctgtcccatggccaagaaaatttaggctcgcagactgttggagagggtgagcaaggttttattgggtgaaaaagaagacaaagggggaaccgggagcctctgcaaggctagagtccctgatagagcacttcctgcccacagcttgaattccaggttccacacaggaaaaggagggaccaggctcctccccagtgcaaacatggtgaactttctgaggctctactctagtgcacaggctgactggaggtttttcggggaccccctcccacctagctgtctcattcctccctctaaagaggtacatccagctgccgtttagattaaggataaggatgaagactgaccttaactgcttcctgctgagagggggcgctgttttggggaaacagcagaggcccatctaagggttcacagcagaaagggccattgtcagaggctctgtttgcatgattgtttagagtttaatggcctgaaggcaagaacagacaaaccaggttattagaaactatgtatcaaaacgaaatgaagggagggtaaggacagctcaaagatcctgaggccttttgccagtttgcacacgtagagggaggccaaaagcctgactggcaaaaaaamctttacccttttgctggcacgttgggcttctgggtccccttcccctgagcccaatcctaagctaaccagtttaaggtttgggaaacyaactctttctagtttggaggatgcatctgaggagagtgccttgtagtatggagacacaattacctattagtgaagagagaacagaggagaagaaaggcaaaaagaaggtgccttttaaaggagtcccagaggttcaggatgcatttgaaagggatacagactgaagatgaatggctacccatctagaaagaggggagcaggcatacctggttcccttttcttccagcagataccttaggtatgtgaggtagagagggaagagcatcctctttccatcttctatccttgcatccccaagttccagtgaccttggtaggtgccaccatgggtgttaaagcaacttgcacccatgaagcaggggggcctaggggtgggaatcatccgctcttacccacgtatgccctatctcccctgctgtcagtagccttggagttccgtagacctcatttatgccatggatattaacgtggcctttatccatgaaacaggaagtttggggttggcttaatcagcaggaatcagtcacgctcacctgtgctgtgccttttaacttctgttgtcatttgcctctggatccctaagatccgattttccttcctaaggctttgatgtgaagcttggaattcagtctgggacaaaaatgtatctcggatggggcattgcatggcctccttatcataagacaaatgctaaagtgaagctgtggaacccagttctcctccaacaagagagagaaaaggatgtcttgtgacacacccagataactggtagctatagttatgcttgccaggatttggatacgtgatgcttggctttggttagttcacttggtcttactttcccaaaaaggaaacctcctggtaatgggcaccctatttattccatcacctggcagggtttgcaggataattgttcagagctagaatattgatccatatttctacattacccatccctcctgttctttctgagctgcagccggagattgctgcttggttcacaggagcaagcagggttggtctaaaaggtagatgaaaacttaaaaacaactaatgagtttagcatttaatgacaaatgtatggcaaattttggaacataatttctgtctctccagtcctcatttttgttaaaaaaattatggtaggactgagtgctttgcaaaatagactttagtcttacacttggcctgattatttgcataaagtgcagcaagaataactatttctacataggcyttttggattggcactgatggaaatgttttccacaaggaatcacagataagaccttttaaagctgagcctagccatgggtttgcatcctcaaatacctgtgagttgggtgatcctctcctcttaaggtcccacaataaacttggagctcttggacctgctagaaagtgacattctttactgaccacaggtcaggaaccctgtacagggactgcatagacaacagtatgaggccagtttccccatggggcttttattggctctgcaagttgagcttgactccttaaagggaagcataccattccagtcaaaaccttggtaaaataactactttctccaaatgtgtcctgctgcaaaagaaaaatggattcttattgcactgatgcaaacaactatattgccataacaatattcacagatagtttccaaattctagaggaaccaggcagagagaaacaaacacgcttcaaactttgttcataggagtataccttactcaattgttaaaggctgtaaatagttcaaaataagtttccttgactctgaaaaatgaaacatggattagcaatattccaagcaaaagtcaaaaaggttgcttcagcttcctgagttcagtccatttggctaactcttgttttgcttgataatcatgagcatttcagcttttgagtcctgtacattttcctgtatttcagtgtcacaatatccaaagttatcagaagcctgtatttgaaagcacctgtcaaagtcctatagcttattataaaccatcttctgaaaaagattaaagcaacaattgtctgtgaatagcaaaatttccagggtagttacaattagaaacacgactgacaaagaagtttagttatctccgtggtttactataacttaacataaaaaccttaattatggttgatagcatatactcagacattagaattttagaaatcccatacaattttggaacatatattggcattattcacccagctataacctaaagaagattgagcatcattttggcaatcccatgtacctaaacatgtcaaataattctgtttacctctcttagttctggacacatcgggggccctctgaagtatttgaaaagccatgtaccagggaagacgattttgaaactgaagtttgactttgggaaggctgttaaatgttcaaggtttaaaacacttgatgttatgaaacggaattccagattactgaggactaagctctgatttttttttaatattgcccaaattcctatctaaggagcctggggagtcatggcttacaaaccataaatkttcatcagatgggttttatttaaccctgtatatcgtgacttactttccaatctgactgtggcataacraggaaaaaaatcaaaatgttttacctcaaaatatatttccttgccataccttgaagttgccctgcaacgtctcttgtgggaaaaatccacattttatagagaatccccttccccctttgttttcattcctttctctccagatccaggagataatcaactaagagccaggcacccttttaggtctgataagaagcattttataaactgctctctcttaagtctgctatctgagagcttcctctgcacaataaaatttggtctccacaatcctttatcttaacctgaacatttcctttctattgatcccaggtcttcagataaactcaaccgtcatccagaaaaatgtttaaatttacctatagcctggaagcctccgctttgagttgtcctgcctttctgaaccaaaccaatgcatttcttaaatatatttgaagtctcatgctttcctaaaatatatcaaaccaagctataccctgaccaccttgggcacatgttctcaggaccttctgagggctgtgtcacgggccatggtcactcatatgtggctcacaataagtctgtaaaaatattttacagaatttgactccttttgtcaacattaccaaaagttatttattttgtcaaaatgatgactcagaaattttgaagaagcgaaaaccttttataaccctttacaaattttgccaaagagcagattaagattagcaccttaggaaaacctcgttatgcttttacttcaaygctcaatttacagaaaaaccatataatacccttggttgaatgtagtcagtatgttcacacagagaacctcttctgcaagattaatttccacaattcttccaccacttcttggaaccttcagctttttcctaatgtaactcaaamcaatccttaaccctaggcaaaagtttacatttccatgacttcttataaccttttactgaaaaacacattttactgttctcatacaccttgcatgtaaatctatttctagtggattcaattaactcctagcaatttttaactgtaaactaaaacttgttaagttgctttaattgtgtgctaactgcagccaaggtttgccttcttagttaagggtgcggttagttccgtgtgtccccaggccttaccagttgtgaagctggcaagtcaatatagttctgaaaacccaaaaagcagtttgtaacctcaaaacacttagcaaaccttgcatctgacctgcattatttagcctacctatttacattttgataatacctgcawttgaccaatagtttttaagactgtttctatttcttaaagattaaagtcatgtgaactgaaaggtaccagactttatcttccctttaaaaaatattagattcaagcacttgtctttctttaggctgtattaattagagttctcttgacaaacattacgtacagtacacacacaggcaggcagaagaaaacccagttgctgggtggggccctttaagagaaagggctaggaaaacatgcagacattgaatcttacagggttcatcctctcaaggctttgctaaacaaatccttgccacaattaccagccatgccctcaggatataaaacaagatggaggcttgatttcacaaccgaaactttgcagagaatacactgacagttgttgggggtgggtggaggctagcctagtacaacatcttctaaaagaaaaaaaaatttaagttaacttgctgatggggtagagaaggggaaagaaaagaaacagtttaaaagtgcctgaggaagaacctcatatttctttgcaagtggttcctccaccagggagacaaatttaagcttaattactgtctgatagagttacatcccttggccagggaaggggaaggctgggacagccaggagtgackgggaaccagccagcaggctgtgcaggacacttaggccatgtgtcccagccccggcatggagtgaggagcagtgggcagctgctgctcgccggtccatcycaaaaaaggaaggaaaaggccacggggatgagaagactcagaagggagagggaaaaagaattattggtttgcatctcacttaccccttctcgagtccccacgttgggcgccaaaaatattgcaggacttttccatagttcagttaaagacagggtccttgtccgtcccacagccacgaaaatttaggttcacagaccgatggagagggtgagcagggttttattgggtgaaaaagaagtaaaggggaaagagggagtctcccaaggcttgagtccctgatagagcacttcccgcccacagcttgaatcccaggttccacacaggaaaaggaagggccaggctcctccccgctgcaaacatgatgaaattcccgaggctccaccccggtgcacaggccagttggaggtcttctggggacccctcctcacctggctgtctcacaggctggagacttgggtggttgtccctgctccttcaatttttacctggtgtttacaggtggagatgtgagtttaccatttgtactgagctttggtttcttcctctatcaggggcatttaaacattccttatttaaaagccaacatacactctattcatttcaaatggtgatcttacttagatgtgtttttttaaaaaactaatatgaaaggagctgcactggttgaaacaatgtcatgaatttggtctgcattaacacagtttggaaaccactgctttataaagatgggcatagtaatacagtagttccccattatctgctgtttcaaagttttagttacctgtggtcaactcgatctaaaaatgttaaatggaaaattccagaaataagcaatttgtaagttttaaaatgcatgccattttgagcagcacagtgaaatctgagctgccctgctctgcccttcccagtgtatgaatcatcccatgtatctgtgatgtctgtgctgcttgcccgttagtgacattatagctagctctgtgatcagatccactgttgcagtatcacagtgcttatattcaaggaacccttattttacttactaatgattccaaagcacaaaagtagtgatgctggcatctactttattattagttattgttgttcatctctaactgtgcctaatttataaattaaattttggccaagcacagtggctcatgcctgtaatcccactctttgggaggtcaaggtgggcagatcacttgaggtcaggagttcgagaccagcctggtcaacatggtgaaaccccatctctactaaaaatrcaaaaattagccaggcgtggtggcaggtgcctgtaatcccaactactcgggaggctgaggcaggacaattgcatgaacgcgagaggcagaggttgcagtgagctgagatcacaccattgcaccccagcctgggcaacaagaatggaactccatctcaaaaagaataaattaattaaattttatcataaatatgtatatatagggaaaaaacagtatgtatagggtttaggactatacaggatttcaggcatccactgggattcttggaacatattccctgtgcacaagagggaactactatatctactctgtccagttctcaagtctgttaagtatcaaatggaataaggcacgtgaaaccattttataaaatttactttgttctatccattatgatgtcatcatgaagataattttgccattttcgtatcttccttaagctcatccatcaaaggtgtaaccccaaatccagactgaaaattttaaatccttaaaatgagtagcccatccagtaggaatgttttaattctatagaagaaatgagttgagaaacacttggaaaaatactaatcaagaagatgattaaaggcaaaatgatggtccagctttatgaaagaaggtggtattaagccagaaatcagactggtattgtttggcatgaattaaacttataataagtcacaataatttctctgtagctatatagtctgggaaactgtaatctagttcccaagtgaataaactgtaagrccaaagggcaaatagtttaacaaaagggaatcagatgattatcttgtaagctagaagagcaaagatactgtggcttaattacatagcttggtaggaagctctagttacaaccaaagtcttaaagtagttgtctggtcatttgcaagatactggaatggtttaacttatgagaagagagaagacacagaaaaaaaacagaaattctgtaatggctcataaattgttgctaggggaaaacaccagggaaaatgatttaatattgtgattataaagactaatgcaatgaacaaggaatgtttcattagtgatcaagaaaattgcattgacgggtatcagatacccatatgattatggagatgaagtctagggagatgtttgggcttaattgggtacagagctacagggtacactaataaataaatattcttggttttgaccttgggataactgttgcgttttaactgtttcgatgtgtctttgattttgaccatgattgtgcagatcgtaacccttaaattctattttttttgcctagaatatttgagtaaagtctgactctttgcagccttgaaattctgtgaccacccagtgggttcttcctgcctgctacacaaacagagaccatggaattgcagtaaagaaagagtttagttgacagaaggccagccacaccatgccggagatggagttattattcaaatcaatctcatagaaggcttgtaggttaggggcttttcaaaggtagtttgggcgaaggcgcagggatggctatgcaatgggtgtttgctgccgattggctgggttggagatttaatcatagggagttgaagctgtcctcttacactgagttgcttctggccagaggaaccatcagttggtgggtccaagtagagccatgggtgccagacatgcaaaaaacctgaaacagtatctcaaaaggccaatctacaatagtgatgttgcctgcaggagtaattagggaagttgcaaatcttgtgatctctggaataatggctggcaattgttcatgtctgtaccttagcagcatccaggcatctctccttccctcagttggtccctcattagctttacaaaggcagttgagttggggggaagggttattatcatttaaactgtaaagtaaatgtctcccaaagctagcttggcagcttgaatgctaaagacaggaggcagatgggctagatcagatctccccgactgtcataattttctcattgatacaacatttacaaagatgatgtcaattcccctattatttttccatgaaaccacacaggtaacttggtattcgtattctggttagtgactttacctactcagattttgattatgcctctatgatgtcaaatatatatatatagatgagaagtgaacaatctacttaatctatcatctggatgtttcatttctatctcagtgataatctggatgcttctgcatatcagactactcatcaaagtcctgtgtgcacatcatgggggcaaaaccattccaaattccaactgcaacttttttttttcttctgaagaatgcagcttccaggccacagatagtcatggcagagtctagacatatttattggttcaactttagtttatagcagaaatctttgtcaatcattgtacaccacctttgttcttctctttccaacacttttaagaacctgtcagcagtgccagtgctaatctgctgttgcctggattgggcactcctctgagtttcctgcagaagagagccaaaattgtgtctgagattttcagcttgatgacatcttggcttaataaaaattcttgaagaagagaatgtgaatttttttaaagttccaggctggtgaaaatgaacaattttgcataagaaataaatccttagcattaagataaatgagaagcactgctgatgtgaaactgagtttgctttgacatagataagggggctaagtgggattctatgggaattgacacactggatctaaatctttttttaattactgcatcaataaatgtgctttttcacccccttctataagatgactatttaaatactttcctgtagcactttttaaatgactgtattcagtggtctcacttgccctgtgctcttaaactggaatcctgacaaggcagtgagacccccctctcaggaagtaggccatgtaggcctctgcaacgtgtctgagttacacagtcactgatcaacatgggaaatgggacaatttctggcattcttgccttctttaacatgcagaccactccgttcctgttttgaaatgactatgccagatatttaacactttggaggagttttcagaaagagtattgatatgcaaagtgtaactcaaaaaaagcagacaaaatgattgttgaacagtgggatagagagagagagagataaatattactttcaaagcataggtgtgtccagggatgtgcttccaagttgaaagctagatgaagagttaggcttttgacttagccaaagatgttgccatgttcactgacagaaaagaatatttcatacaataaataggctagccttaggctaagaaagaagattgagttggaaaaggaatgcaggtgggattctggaaataggagtcagtttcattcactgcttatggcttaaaggtaaaggagtaggttgcagattccacagaaaaaaatattgctagattagactttcctgagagagaactgttaggttgtgaatgattaaaacaatctttgcctgggtattgaaagtgggagaaggaaaatatggtcaggagcattagttgcaaacaatagaatgggctctaatttaaatagagaaggaatttattaaaggatatggggcatttggaagaatcattgtagacccagagaaataagcttgaggctaagcttttgggaacaatgtccaaaactatgttgcagaactggtctggtcagaaaacagccattgacatgctgttgactgcagaacattttcttagaactgggcttatgaggcaattgtcaccatctacttactggataccacaatgttttcctgactgtaacatctaggatacgaaggatttaattttattgcaatttatcctaacatccccaaatctggatacctttctcactgcctatactggaaaaatgaatgtccacacatagcctgtttttcctcattgctcacttccacagtgaagtcttgtgtggcctgagaagaggagrgcagaccgcatgcctgctccttagctgcaaaggatatgagttttctgaaattccctttgaaaaggaagaattcatgatgtggagcaaacattattatgagcaagaatatccagaggatattgggcagccacgcgagacaaatttcgctctgatccctttcttggtaccaaatatcaataatactcctttttttttttctccatgtttcaactttcaagttataataccttgctctgacttaacatactctaacttacccttgaacaaacagtccatcagtaattctatccaggaaaccctcaatgcttctgctcatttggggttgctggagtctaaccctttaccatggcacacggcagtagcaggaatactccagaggatttacctgcatggtaggtattctcttcatggcctccattgctgagcaggaacttcatttcccaactgataatcaagactaatgacccctcccaacacaataactccctttttactcagtttgagtggggtgtgaggtgtccaaaatgtccactggacagtttcagcttccaatttcatagaaacactcttgcatctgctaaagcaaactaaatatggcctgaaaaggccatacttctatatttgagtctttgtggatgaactgtaacctagcttaacagacaaaattgaaaacctaagttaatagtatgcacctgtaacaatagctgagtgttggccaatcccagcggccatacttcaaccacacatagactgctgaatgttcaaactgcgttcacacaaggcaaacactgagctgtaaccaatctcactgtttctatacccgacttctgattcctgtacgtcactttaccttttttgtctataaatttgttctgaccatgaggcacccctggagtctgtgaatctgctgtgattctgggggctgcccgattcgtgaatcattcattgctcaattaaagtcctttaaatttaactcggctgaagtttttcttttatcatatctattgttggaagcatttttcacttgagttgtaagacctctacaacagcagacctcaaatttcctggtaaggaaagcaaaatgagtgatttgttctgtgtaatggtgaaaggcactgctctcccctctcccctttgacccctggacatatatattcttggtatgggaaaatagcactataattaatcactagttaagagaacgttctgcagcctgtaggatagtcctttagcttttcagggtgttgtcttttaactggaaccacagccaagttattaactggccattccactgttgaggatggggtactaggtgagactatggaatcccatgagcaccaactaaattgctttactttttaatatatgtacatataaatatatgtacatataaaatgagtttcttagtcaagaaggttctgtgggagaccatcaaggtgaataaaacatttaaggttgttcacagaagcctggcaaacagggaaataattcttattgagtatatgtcttttccaagaagtatacattttcatctcctctatgatagatggggtccatacaaacagcatgcccccaggtggctggagggtccagtcagggtatttttctgtatctttgattcaggattggtatattaatcaggcagtttgcggggcaattttcctctatacagagaatgcagagcaatctggcattctctgacctcatcacttggtgtgcaggtcaggcggtatgccttgccagggcccctcacaggcatgacaggtttctgtttcctcgtagcccgttggcctgcactagtcacatggccccaccttaccacaaaaggtagaggaaatgtgggagagcacattggtattcactgaatcaaaaaactaactctccaacagatttccttattgatgtttctagcaagtggtacatttgggagtggcagtggccagaactggtgaagtccttattggtcagcccatgcaaacctctgtatttggccaccgtagatactaaatagcttttatgaatatgctgattaagctctgagttggcagggaaagaggccttgcctacctagctactgagtgccttctccacagtggggaccttctagtctacattcacatagacagatattttcacactctggtaaaagtttgagaagccttactgtgtatttgttcccttccctttcagtcttcccctctttttcttcctaatgcctcattcatgagcccatgaattaacgtggaacaatacctcaggccaactatttttccaggcagtgttgaccacaagaggtaattatttgaagttttgcccactgatgggatttttcttcttcaatgtcctttagggctactcaccttgagtggggttataatattcagggtccacttcaggctggagctagcttatcgtgcaatgttgtctgtaaagtaggctttatttttttccttcttcaggtaactacataaaaaatgccccatgaagtcttaggtttgggttaaaacagggatagccagagtaagcctaatagtacaatccygtgtaatctactttcatttgatacagacagctgctgctgagtgcacccaatgtaatagacagtggataaaacaacacccaattcaggttgggcagctcaggccacacagtcacctggtgtcctatcttgaaacattctgtctcttgttggggcgcaatagaacaagagttgcttaacaagagggaaagcctttctttgattctaatctagagcttgccaaagcctctttcttatttctgttcagaagccacagatagtctgatagccatctgatcatctatcatgtgaagacaccraattttgttaatctgtttctctgctaatggacattttaaatcagttaacagtagattctctgggatatataactagaattgggagccactaggttttcagagtaaatagtctggattagaatctcacttccatcacttaccaggcacatgatcgtagcagacaaattaacaaattctctgaaccttgatttctttatggaggaaaatgggaaatataagttcctacttcatagaagggakgtaagaattaaataaaatattgtgagtaaagacccacaatataggcttgctgatagaaacactctgtgcatggtcatcattgtggtgtctttatcatcctctctgttcttataaactgtagtgagcaaacaaatataatctccattaagacaacatacagattcacttgccttttggttgaaatactatttactttatattaaaatgctatsattatttcttattttatctttaaaatgcctgttatttgtctgttttttaagctaatggtagaatttctgttaacatttgtaggctcaattcaagatgtaagttttgcaagccaaatgggtcagcgatgagttaaatgtgggaaatgctggagtaaagaactgaagtttatataatcatttagcattaggatgagcatgaaaaatgtccaaaaggagattgagcatgccacattccaaaaggtatttggtccatggattatttttacaagggtcactttcattctaaggaatgcaattttagaaatactacactgaactgtgacttcttcagggataaggatcttgtcttgcttatctctgtgttcctactaccwagcccagtacctggcatatactaacatttattgacttgatcaaggtgatgtggggagaaagatctgttttcaactgtagttcctatcatcatctcagtgttgtaggaacaccatgatctctggagtcagatgtggccttgagactcctctaccatttgaaaaggctcccatgttaaagtgctaacttctgggtttatttgagacaatagaattcttagagacaaaatctgttgagatgttataggataaaattattcgagtatggatagtcacaatcttcactattttcctagcttctatacaggaagaatttgagcttcctgggtaaactcccaggtcctccctaaagtaaagaaaacagaaataaaagtaaagaaataaagagtctgtgttgaagtacataagcaagagtggagagatggagacagtaagccggacaggctgcccagattgggtgttagagccattggataagtgccaggaaggagagtgctcctgagtcagctgccaaccacatgaagaattttcagaaaggcagcgatgaggagagaataattttacagtattcttaatgcattaagaatagacatctcttcttaataatttttcatgtgtccaagtatattagtcagggttctccagagggacagaacaagtaggatatatgtatgtatatatataagggaatatattaggaagagttggctcacaccattacaaggcaaagtcccaggataggctgtctgcaaattgagagagagagaagctggtagtggctcagtctgaaaggctcaaaccagaaaagctgacagtgcaggcttcagactgtggccaaagtctgagccactgttgcaagttcctgagttccaaagrctgaagaacctggaatctgatgtccaagggcaggagggatgggaggaggcatccagcatgggagaaagaaggcagccagaagacacagcaagccagcttatcgcaccttcttccacctgcatttggtctagctgcactggcagccgatcggatggtacccacccacactgaaggtggatctttctctccagtccactgactcaaatgtcagtctcttctggcaacaccctcacagacacacccagaaacaatactccaccagccatctaggcatccttcaatccaatctagtcgacacctaatattaagcatcacaccaagtaaacctgtaaagaacttcctggatccctgattacatttctctctgtgacaaggtaccgtgactggatcacatggagccccaggatttttagtgtaagtatatttgattcacctttttttctggctttccccctaaccttacccactattctcattccccagtcaacactcgtgggcccctaatcatttttgatgaaatgtgtctttctgttttaagccctgatattcacttttatttgaaagaaagcttggttcacattttgaacatctatgattctgtggcaaattcccttttgagaaggtccagtctcttggtgtctaaactccctaaacttccttttgctaatgtagtagaaagacacttgagatttcctcatgattttcaaggtaacatcattctagaaggtatagcttttagtgctgcccctcacttgatgagaggtcactggtgctggttttgacagcatatttagaagccttcttgtttcaatctcccggtaactgccattcccagtgccagtcttttttctatgagcttcaaatcttgcagttcctctttttaccttatgacatccattcatctaaccaactgagagaagagacattaagatgtttcactgagaccagtgccactgaggtaaatatctgatggcttgcgtagcttaggaaaggcaaatgtttctatctgaaaatcctggtttcaatgctaaatagacaatgcaatatgttacctctatttgtactttttttggtttcaggttaagaatatgatcttgaaatatatatattcatatattgacatgtcatttatataacattatatatttgtacatttattatatattaattatatgtaattatatgttgtatattaacacatattaatatatctataatctcatcctagttttttcttaatcaatacccccttgctctttatttcttataaatatcttacagagtgagtcaaaatatgcatttgttatttctaaagaatgagacttaataccctgagacttataaatagaaagttacagaagggttaagttgaaacttttcttcgtattttttcctgggtattgctctttgctaccccaggtttacattgccactgcttaatagcagtgaatgtcaaatgagcttttaccctgcagtccactgttccattgttaatgcagttcatccacctccccacctacccatccacctacagctgaggaaatcctatttcatgatgaaattgatcctttgggctttgtttctgaaaggcagcctgggagttttctgyatccttgactggattgttataaaaccattttggcagatgcaattacagtgtgtctagtatatgtgtgtgtgtgtgtgtgtgcattttcctacccagataggacagttttaccctgagaaattgatagcatgccccatcaactccaagcccctcargaatggtgggagtgacaggtgatggagcactacatgatggaaaacataccacgctggatgtcaggcgttaggctttccaatccccgtcgtaccactaatttgctgtgtgaccttaagcaacttagttaacctctctagggctcagttctttcacctgtgaaatggagttaataatacctgcccctcttaactcagcgggctatagggaaaatgaaatgagaccatggatgtatgggcagtttgaaacaaatgaacacaactttttacagaaaaacttcagggtgcctgacagaagggatatctttatctgaagtaaaaagcagtgttaaccggagtagctgatatgaaacattcttccacttcatttcaaattaaaatgttatccctgacaagagagctagcagccttgtaatatgagtcttgatttgtgtatatgctgagcaatgtgcataccccatttttcctgatgtaagggttacctgatcacactccaattttgtagtagccaatacattattaaagaacacagctcatcgccatgtgttgctggatacatacatgggctttagaataattcagacctgggtttgaatcctggatttgccacttactagctatatgtccggtgacaagttttcacccatatgccaaatgggcaccaaaatagtacctaccttcacagggtagagataatgcattgaattgcttcacacattgcctgctatataataactcaataaatgctaggtattggtagatgacagtagctatggaatgatggaggtggttgagtgttttcttcctcatgcgtttttgaactttcaaatgttctataatgactttttatggtcagatttgaagaatattattattttaagtgaatacaatcataacagacttacagtcgtgaattgacagtgagcccaccatgataatgatccctatcatttcgattgggctttgtaacttaacacagcacagcacttttacacattctgtctcgtgtgtaagccaacaagcctgtggagtcaggagtactcatattcccattttgtagatctggaagctgagggtcacagacacctacacagttacacagtgtatgaagtggtgatctcagatgtgtcagagagaattgcattcagtttcagtgaacagaaacccagttagaatggtgtaayggtgtagcagtcagggttctccagagagagacagagatgatcgattttaagccgttcactcacatgattatgaaggctgagatctcagtccaaaatctgcaggttaggccaacacaataaatacccaaggaacagttgatattgccactcaagtccaaaagcagactgctggcaaaattccctcttccctgggggatgctactctttttctaagactgtcaactaattgtcaactaattgaatgaggcccactcacattatggagggtaatctgttttactcaaagtctactgatttaatgatgaatctcatctaaaaattaccttcacagtgacatccagatatgtttgaacaagtatctggataccatggcctagccaaattgacacctgaaattaactgtcacatactgctagaccaaggaggggcttattttccccaagatgcctcaagaagttcaaagtgccagcgggacacagttccttctatctttctgcatggttatgccttgccatgggacttttgtcctcataggctacaaactgactactccatccctgggcatcacaggcagaagaaagagggaaggatcwtgggcaaaaggcaaacactaacaaactgtgttatctgagtcttcccttttcaacagacttttttggaagccctgcctatcaaattcttattgatcttattgatcaaccgatatctttttgatgactcctagatgcaagggaggttaagaagctgattattttttatctaagttaaaaaagagagagagagaaagaaaaactcagggcaagaagtggagaataactgggtaggcaagtggtggcatcatccacaccaggtgttctgatgctacatcatttatgttttacatcccaccaaattgctcaccatacacacatggaggtgtctatccttgattggactgccctttatgttaatcactgaggtctctttggatatgtgaattgaacccaggatcaatgtgaagtcaccttcaatttaatggaagccggtagcaaaggaaggataaatttgctgggcattactttttcttttctgactcctgatgggctaagtagagaaacttttcattttaagctgatggaagcagcaaaaaatgaaaataaggatgaggtgtgaggggagggggcgggcattggtaaatgttcggatagctggtatattatatgggccaaatgatttttcaaaacttgtttgaattatttattatgtcctagctacagggcctgaagcagtctgtctcactatcattgtcacagttgaagtatttaaagccgaaagagagacatctgtagcattggtcttttgtggtgtctaggaatgaaaaaaaaaaaaaaaaaagacatggaagaaaatagtgtcagtttgtattagaacatctatgttgataattgcttgattttgttcttttttcaaatcagacattcaaagggtctcctttatacttgcaagtaaatatttcgaaagtcatttagtgaaaactcatttggaatgtaaatagaaaccatgtgtcacattattgaaatgtgaccagaacagtgtctgtcttaaaattttgctcatgaagagcaacataaaaaaagaaataattttttatctgttgctctctctgagacatgcatgtgctcatacgcacgttcactcatacatctgtaacaccccattctgtctctatgttatcttgtattcatttcatattcctttctcaatatcactgtgaaaccactttgttgtataatttccatgtagctcttttggaatttttgcaattctaattcttgctggttattgcattacaaaagagtggcaggaaagtgtatttgcatgcaggacattttaaattttaatgtcaaaggtcattagtctttcccccctcccccttcttctggttatatctaggagctgggcttttacatactggggataatttataagaaagctattaaaagtaaggcttcagatttatttttcacattctcggagcccaacaggctaaatgagaaagagtctaaaataaagatcatttccatatatttgaatgttgttttgttggttgtgccactcaggtctattggggacagtggggtaccacatgggaaggatcacgggcaaaggatcattcctagcaactgccacgtacattctccctacccagaatagaatgaagatctcttatggtagcttaagaacactaccaaatgcaacatttggaatttcttcataatttcaagttgccatgtcttctttattttccttacatgaatatcttattttttcctttctagcttaggaaggagaaatttgctgggcattactttttcttttctgactcctcatgggctaagtagagaaacttttcgttttaagctgacgggagcaggaaaaatgaaaattaatatctttcattaatattagtaggatttgtggattcatatgaaaggcagtttaaagcccaacacactgctcagcaatcctactgcaggaccctactccacccacttgccctggatgactatttcccacccttttctcagatctccaatagcttctctctgctggtcctgctatgtgtatgcccttacttcctgttttactgagcaaagctcagtcaggaggaaacctccacatgctctcactagcctacctgctcctagaccatgtgctctctgaactgttctgcttccaccctcggccttcatggtgccgtgaacctcaacacatgcctacaaaaacacttggcttccgcaattatctgttctctcctgcatcatttgggttcctctccctactagacaattctgagaggatatgaagatgctgtagtgtctctaaactaaagagatgaaagaacgaaaggagagagaaaaagaacaaaggaaggaaagagagaaatggaaagaaagagaaagagataaagaaaagaaataaagagagtaagagagggagaaaagaaagaaagataaaggaaggaagaaagaaaagaagggagaaaggcaagcaggaaggaaggaaaaaaggaaagcrggaaggaaggaagggaaaagaaaaaaagaaagargcctgcataattcattccagctcccacgtttctctgcttcccatttacagcaaagaacatcagaggagttgcctgcacatgttctctccatcccactttcatccccaccgcttctcagaatgcacttgtctgggtcatccatggccccttggttgccaaatccatttttctactcagttctattcttacttgatctatcagcagtacatgatacagttgatcacttcctccttcgtgacatacttttttttcagttggctttggggacaccacaccctcttggtttcccacttaaccacactggcctttttggtctccttgctggtcatcatcctctttctgatctgtcaatctgtaatgactcagggctccatccttaaaaacttgtctcttaatgctctcctcacttcctagaaaatctcatccactgtcaaggttaaatactgatgttttcgaaatctctatctctagcttagacctcttctttcaactctagacttcggttacacatcccatgcctactcatgttcccttggatatttaaatggcatatcaaatataaatgctacaaccctggtctaagtcaccatctttgctctagacttttgcgtaagtgttctctatttctatccttgccaccttatttgcaacacagtagccagaatgagccccttgaacctaaatcaattcctatcactgttctactcaaaaccataaaaacttattgtctcaaaatagaagccaaagttcttgaggctattcatcttgtccctgccgtctccctgattgcataggctgccaatgtcctccttacttcctctgctacagtggcactggccttctactggtactcaaaagtgccacccacacctcgtcatctcatgatttccgcccccagaacacacttgccctggacatcgccgtagcttgcttcatcttttcctttagatctctgctcagattatcaccttttaagaaaggcctactctgtcttttataaatcagcagtcctcttgctgatctcccactctctattcctgttaaccatttcttataagcacataagatatcattgagttgtttattttctgattctcccccagaatgtaagctccaagagagtaggcattttgttttggtctctgctctatgtctagttcataaaatagtgccttgcaagtagtaggcactcaataaacattgattgaataaatgaaacatggaatgagaaatgtacatctaaatttttaagcgacagctctaacaattggcctgaaatcaaatactgatgaccactaatgcttattttattttctgaatccgcacgcccatgattttggcattttacctctttggtgaatttgttgcttctcctaaaaaggtaaaagggtgtaagatttccttgataaccttttgagttatatgaactcaagctaaacagaatgttactcaaggatcacagtaactgaacgtgtcaaaatagtatcttgcttctctcttcctgtatcagtcagccccacaggaaacagatggcatccatacattgggtaatttgactagagtttaacaaaggtagcattttcaaactacaagacagagtgcagtaccttggggctagctgcagcgttttctgatgctactcaactcctgaagggtaaaggggaggaaagaggcataggagagggaaggttattgggacctgagggagagctgtgtgacaggccccttggcagaggccacctgaaggaccagcagccctgggtggtgggatacaaccaacctgtgagaaactctgcttggaggtgacagggtgctgagggactaatatcctaagttctttctcctcccttctgatctctggctggggtttcccattgaccaaactaactggaagctagagagccctgggccgtagtccatgtaagccagcctctgaggcaggcaacaggcgaggaaagggtggagggcagatccagagggtaatggcaggcatccagcaggacgtccaagtgctatcttccaaactctagactagtcttccacttctatgcgagtgtcgtgtcatccattcttcacatggcagccaaaataaaaccaccaatctgttcatgttgttcccttgttgaagactgaatcattcaacagctttctcttgtgcttacaattaattccaaacscactctagtggtataccagacccatgaggggctggctggtttctactcacctcttccctgaagcttatactacacatgtccaccctggtcactgcaccaactcaaggggctgccacttcccaggaagagctaagttcagtgtcctcaccggctcttagcatactcttatctctctgcctgcagcaccctttcttcaaccctcgacatgcttgactcatttagacacmatcacctaaggaggcccttcctgtcctctttgcctaaaggaagttttccattcattctctatcagaaaatatttccttcacagcatttatcacaaaccataaatggctyctctttctttctctgttgccrttgctttgttcaatctgaactgtaaacaaaacaaagtcagttkcttcttgttcactctctgatcttcagaattcagaacaatgtctggcccaggtggtttctcaataaatattgggtgattgagtaaaggaacattattttcaatgaaaatatcttcccatttatgcaatagtgaaaaaatagcttacttgaartttatctccaatgtatctaaatttctatctctttagtatttgggagatctcaaatatattaataacacatacttgaataaaatatacttactaatgacagagttgattttctacagctctggctgatttttttttgctgttgtttgtttgttttgtttttgtttttctttttttgtggttggtcttgtatgcctttaacaaaaattaagctaacaaatgaacaatgccctttccccagtccatagtttcacagcagagctaattacatgcagctgactttttgggtgacttattggaagttagtgctgtgtggtcacaaggtttgtgctatacagacaaaaagacctggccaaactccagttaagccactaattggctgggtaagactgtgacaagttattcagcttttctgttccacattttcttcctctataaaagcaaggataatgcggcctaattcctagagttgttttaggatcacaggtgataacatagatcttctctttcctctgtgtctttcactttctttagtgacagacatctgctcaaatcctccttttttcctctccggctgcttcttcatcaataccgtctccccaacccattttattagtctttgaatctcatgtccatattctgagaatcttgctggaaggctttcctgtccacacttcctttataatgttgaatttgctctctggtggaagcagcctggagcttgatcatgcccatgacgaattgcagactcatcaggcttttcgtttggcatcgtatttgccagacaaatgtagacagcacttttgtgtggtgaagcactttgttagtacttcgagcttctaagggacaatktgagttggaaaaaaaaggcattgaaaccttgtacaatactcaccccattacacaagaaaaaccaaatgagtttatctgacaaaaaggtgtgggtatgtgtttgatagaagaagcccaagccacaaggtgctctctctacagagaatcaagatgcattgaagttttttgtcttttgtttacttctttttagtgaaatttaactaatacactttgaatgcattctctgtgccaggtattttctttattcttttagatgaacttggaacggtgaaggttacaaagtaaaaatatttaggagtaagtggcttttacaagatttgaccaaagaacagaatgctttgctgacactttggaaatgtaagggtggtrtatgtttaatcgggaaatactcagtttctaatgcatgcaatgtttgtctggaacctttttccttaaatgattcaaatcagttccattcaaacctgtgtacttagcactcttgataggtactgaataaaacaaagatacagtccctccttgctgggacttcagagtctggctcattgttccttaacttatttaaccaatgtctctaaatttctaaatataaatatctcaggccctctttacatgttatttgaaactttaaataagctaaattaaagataattaagttaaagccctgctttatttttgttacctataacttatacatttatttatggctctctgaaatactgatgtgactgatgatgtgaaatagcaaacacttgctgataaatggcacaagcttgtcatttatcagtcagcttcatgttttgtagaaaccagaggttgcaaattagtggttccatgggtccaatgcagatcacagagtcattgtcatcctaagtgagccaacatttgaagttgagatattatccatagaatgcagattttcgacttatcttaaaacattggaagatcgggtagctatgggcctgcattcccacctgacagcaatgggatgggactgactggctgctgcccccttcagggaggacgtgttctcttctgttgtcatgtcctcatcactcatccagtaaacacacatgcctgaaaattggcctgcagcatgcaactaactttcctgactgctggaaaacacttgagtttgagagtcctggtagattccagggagaggagattggagtattttcagaatacagagtagatggaccttgaggtattggtaggatttatatacttgaagaagtgctgagaggaggtcatgccagaaaggagaataactttgatgctgaatcccaccaggtttttctctaataatatttaaattgctgaaggatgcagatgatttccttttttctaataaatgaaagcatatttaaggttaagactcttactctcttgcaaccttgcaatctaatatactttcttgagaggaaggaaaaatggagaagttatagttagcaagagctaggaatgggtatgactaaggttccagcaatgggacactgtcaggtttatgaattctatgaattcatcagttaaaattgtgtgtgtgcctatgagtgtagaaagggtaaatgttgaaaacaactgtgttacggcagcaaagattcagatttgccacagaaaataaggctgacattaccactgagtatctcccaaaagcttctcatcatagtagttgagccagtacttttttttttttgagacagagtttcactcttctcacccaggctggagtgcagtggcgcgatcttagctcaccgcaacctctgcctcctgtgttcaagccattctcctgcttcagcctcccaaatagctgggattacaggcatgtgccaccacgcccggctaatataaaaagagtaagagatgatgagtttgaccaagatacctttaagagtatgacttctgtcaccaaagacactccatatcctgcaggatttttctaaaccagcctctactcgtatgtgagattccccctgttgatatcacgcttaagatgatatctctgaaaagccactatcaggataacattgcatcaatgagtagtatcatctttacatttaagagctggttttcatttttcaggttaactggcctttcactaacaggcagggggccgagaaagagtgcaaagtgggtaaagtttactttgttttgatattattggagaatatcaaatgaagaagttttcttatcctggtaaggccagatcccttgtatagcttgatgtttccttggtcttcagaagactacaccataaggatttatttttgttaaattgaaaacagatctcctcccaaaggaaaggcccttttattgatcctgaccttttccttttgctgggaaaggcttgttgagttgccttttaaacaaccagaaatcactgcttttttttttccttgtaatcttttatttatcctgttcacaggccttacatacttaaaaataaatttcctatggaaattgtaaagcagccctacttagtgaagagttaaggatagaaaatcgtcttaacaaatcacatgtatcatgtgtcagaggcagggcaggcagttcaatacctaattgtccctggcctcaccctcttcaattttactttcttcttttgttttcatctgtatcttgtgagttcccacaagaggtacttcagagtttattttgtctagtagtgtcatgagaaaacttaaagcactgacttgggattatattagattattagatggaagaatcaagaaattaatttccttcaagagaagaatggcatgtctggccaaacagaatattgcttaatgtaatagaactcccaaatgaaattggagagtggatcgctcccttacctgggggatgtgagattattgaattccagatttctgtataaattaacatccaaatgagtggatccgccctctgctctgccagccatttctctccctttttgtgattgttctggacatgaatgtttctgttacccgccagagggctgcacatcttcagccagctctgccagagaataaaagaattaatggattggaacctaatccataactccctaactccacagctttatttttttaatagttcataaacttcttattttcccctttagcctagatttcctttatggtgaaggaaaggtttgccagcctttggatctgctttataaaaatgctttaaaagacaatgctgtgttgtgtgaatgcctgcaactcaccttcatgcaatattcaagaactgtcccagagtttatgtctgaatttgttctgatgtaaggaaccctggagccaacaacacaactagttccagatgggttaagttttgcattcttaaagacttagtaggccaataaatattgcttctcttagggctgtcgaaagtaatgtaattgggagcacgacagatgcctaacgggatacctagagatctctattttgaaatttctaaagtgacataatacagtttgtatttttttcagaataactacattaaatgtctgtttttcagaatgaaactctctgtgggatctgttttggcatctttctcttcttctgggtgatagaattgggagataaaccagtgactgatttcttaaaaagttaagttttgagaaacatattttataggacacacatgccttacaccaagcgctccaacagcaaacactcatgattggatttggaaacagcagcatttgctgtctgaaggggaaacctacacaagtggaatgtatccagggttgtgggttcgaattgttcacaaaataaaacgcaaaaaagtagccattgttgagaacttggagaggaggtctcacttggcacccttcacatgtccttttcaatcagagagggactggccagcacctactgaccccagtcgccttccagtttccactccatggccctgctgctgcacagaagccttagtttcatgagctccctgtgaaaaatcgaatgcacaattgattctcccctttctggaatttcacgtgttatctgttgggaaataaaaaataagtgcaaaagcaaagtatgttgtgtaatttgtgtaagttcttcctgaagtatgctttctttttgaggtgacctattcattcctctccatgtgttcccccacccccagtgaaaacaaccttttatttcctgattactgatatgtgcctttgggataaactaaagaagagagtaagactcacctgaaatttgaagactatggaatactaaaactttgcaaatttcccaacaaatgtctcattatgcgtgtacgtagaaaaacacaaaattttataaacattttacataatatgtgtactcttccacctgcagctttataacctagtttttaaaaccaaatatcatcttcctatgttgataaatatacatctacatcttccacttaaaagactgcatagtattctattttataggtgtaccacaacttacttagcctatccccttttgatgggcatttagattgtttctggtttttttatattataaaaaaacaatgaataagcattctcatccatatacatttatgaatttcacaagttgtttcctttggatataatcctacgaatgaattttttttcataaaatactaccattaaagattttgagaaagttgctaccctgcctttcagagagatactgatttctacttatcccatctgtgtatgagcatctccaattccttaaaatctcaccaacagtgggtagtataaagctttctcaaccaaaaagggacaaaaatatttgttgtaatttttgtttgaatttctttgattcatagtgaggttggacattatgccatcattggcattcctatttcttcttttggaaattatctgttcctatcctttgcccatattttgctttttggattttccttattgcttgcaatggctttctgtaaatactggatatatgtgattcttatagaagcatctggaaaggatcttgtaaaaaaaatatttgagaacaatgcaacattaaagtgagaaaaataatttggtgctgtctcactctaagtatccattgaacacctctctgttcctcagtttcctcctatataaaattagaaaagagtaatcatccatttctcagatttcttcagttgtaataaagccagtagttattaaagtgaagcatttcacccatgttacttccacagtaaacactctggtgtcttctgttgttctaaccactctcgacttacctggttggtgagaaagggtcccaccctagggttagaaagatgactgaacaacactggaccagtgagacagcagtttgttagtcacatatactcacagcccagggaggaaggaccctgagtgccacacaggtccacgtgggagttgcacttgggaacacagtgagcaatcaggggatgtgggaagaaggctttagtattaagaggggtgggattatccctgtttctatgggaggatgaagtcggcttgtctgaataattctgcaggctggcaggaaactgaaatccactactccggaataagaggaataagcaggaaccatgcctggttcacatgacagggagggttgtttggctgggggactttatttgcaggagcagagctgggaggtgtattagtctgttttcacactgctgataaagatatatcggagactgggtgatttacaaaagaaagaggtttattggacttactgttccacatggctggagagacctcatgatcatggctaaaggcaaggaggagcaagtcacatcttacatggagggcagcaggcaaagagagaccttgtgcagggaaactcccattttaaaaaccatcagatcttgtgagactgattcatgatcatgtgaacagtgcaggaaagacttgctcccataattcaatcacctcctgctgggttcctcccacaacatgtgggaattgtgggagttacaattcaagataagatttgggtggaggcacagccaaaccatgtcaggaggggaacttgtcattaggtcatttgaggccctcctgaatttctccatatgtcaaagcagcacaaaatatgggggccttgattttagaccttatactgcaactatttctgagaggtgagtcctctcagaggactcagaattcagtggcctcttctcggtccccattgcctttgactacgttcatcctatgcaytcctgaaaactcttcctccattgccctccatcccacagtcctgtccatgaaggcatgagtcagatggtccctgagtgaggcaacatgcctttgatcccatctctgttgtcyactagttatatggctttgacaagatacattactctcagccttggttttaatgaaatagaggtagtgcctacgtcataaaatgacatagaaaaagttcccagtttagtgtcagacttatactgggcactttaatcttaattctttgtatctttcacttgttaatgtcacatgcagaccatctaaatttgagtattaactaagatttgttgcttaccttctagtcttctttctctattccttaatccttggagatatacccacatttactatggcttcaagttatggctttaggcaaatgactcccaagttgcatttcctgcactgatcactttctggttttctggttccacrtttccaattgtctcctagagatttttcctgctgtgtcttattcagcatgtttaaaatttcccccttcaaactagtactttctcctgactggcttccttatttgtgttagtggtgacaatgatctctctgtcatcttggcttaatgcttttaagtcaccattagttccttctctttcagacgcacaataactcagctgttaggggctgttggtgtcttctctcacagtagggcttgaatccaccctttccctccatcccagacatcagtgcctttggagctggagagttgtgctaggctcctaggtggtaatgtcgggtacccactcagaagcccagagttggtctgaagattattttaagctgaagacatttgggattcaacagatgcggaaaaaaaccgtctcagagcttctcttatttgactaatagcagaaacttctgggaaatgaggctttcataaattccttcttcagggtggcctttactcctaggaaggagactcaatatatcataaatatcctctctgggggagttttatagccttgaagaagacagagagaccactcgtacctggatgaacaaacattattacaaactttcttatctctcattgtttttcctgtagaaacctgcttattctttccaaagaggtcttttctcccactcctttttccctactaaggtagttatacatttgcccctccatatctgaggttcaattaacagtggatcaaaactatttgaaaaaaagaaaattgcatctgtgctgaacatgtatagacttttttctcttgtcattattgcttaaacaatacaatgtaataattatgtagcacttagattgtattaggtgttataagtaatctagatatgatttttgttgttgttgttttgagatggagttcactctgttgcccaggctggagtccagtggctcaatctaggctcactgcaacctctgcctctcgggttcaagcatttctcctgcctcagcctcccaagtagctaggattacaggcgtgtgccaccacacctggctaatttttgtgtttttagtagagatgtgctttccctgtgttggccaggctggtcttgaactcctgacctcaagtgatccgcccacctcggcctcccaaagtgctgggattacaggtgtgagmcaccgcacttggcctagatatgatttaaattatacgggaggatgtgtacaggttatatttgctattttatataaggaatgtgaacctggattctggtatccgatggagggcgagagagggtcctggaaccaattccccatggatacccaggcaagactgtataagcctctaactttaaccatttattgagttacttcttttgtaagcttccatatgcacataaataaacttttctcctgttaatctgtggtttgtcagtttaatttgcaggcccccaaatacctaacataagaagataaaggaaaagtttttttgtccccaacagaattaccttgcctgcaaacttccttcttatctttccagttcatcctatctcccactctctaataaggctttcagagtttcagctctgatcacattttctctactccaaagcttctaatggctcctcagcacccaagttcctcagcatgacactcaaggcccccagcagtctagtcacagcttacttgctaggatcagcatccttagcattcctataatagattatatcaagttgatttgtttttaatccccaggacatacattacactgagatgcacttgcacatttttttctgtttctgtttttactctacctgggatacccacctttccattctcagtgttttgaaatcttagattcatcattcaaatcctggcattgctgattatataaccttgaaaaatcacttacctctytgaaccttgggttccacatttgttaatggggataatattatcaagttacagggttgttgttgaaaacaactaacacaggacttgtgtcatgaacacacattgaattgtcgttgattctgttgctcctgtcaccccagctaaaagtaatctttgccttctctaaatacctgctttgttgcttataacagatttatttaattttttattttctttcatattgccctgtgctgtgttatgtttcaaaatgttctatctttactaactacactgaaagtgccttggagttgggtatcaagtattgtatttttttatttattcagcaaaaatttattgggcattttgtgtttcatggtgtgctaggggctggggatacaaacatgataamgtcttagcctctgccatcagaaagcttgcacactatctaattatgattgaatgctacctagactactgttgagataagctcagtgagagccctgagaagggatacctgactcagctcagaattcaggatggcatcctgaggaagttatgtctaaacagatccgaggaatggcaggaattagacaattccaggcagagaggagcagtgctgctagatgaaggaggaagggcattcagtgcagagagaatactcasatacacagaggggaagtagagcatttttttttttttttgtgaattccaagaaccacagaactgtgatcttagttttaaaggagaattcacaggagataaaaccagtaaggtaaactaaggctgaatcatgaagggtttttcagttctttctactgttaatcatgcctggttacagtacctayatctggtaggttcaataaatgcatgtctagcttttataaatagtgaatgtacatggttcagtcttggagcattacagtcaaggaaactccatttggcaagagaatgaagtttcacaatagctgaactcttttacttgtatttcttatatactaaaacggagagccatatatctaattcaagccacgtttattaacaaacaaacatacaaacaaccctcagcccctacccagtggcatatcttcacactgatgtctctttcttataccctacaagtaaaacagaaacagaaaacattttatctcctccaccagctgacaccttctggcccctccttgtgctttcctcacattccctccatacccttgctccatccctcccttcttactctctcttcctttttccatttccacaaaagtccagtgtgactgattggcagacactgagcttttctcaggtgactgtaggttaataatgatcgtccgaacccatgtaaggaatgaatgaagcattgtgtggcggaaccaaaggccgctgctgtcgctcctgaagccctgtgtgtggtaattgggtctacctcagaaactcatcctttcattttcaaaataaatgygttcatccagtgttacgtttcccaccccacctccttcaattatctctcccaaatcttgaatcataaacttctggaaagccatgtgaataatttagatgcttttatkactcattgcttaactccctttgggggaaatgaaragaaacctttgtcttttgctgcttactctcctgtggaccgagaccatgtcagcttcaagcgataacaaagattgatgaccacaggagctgtcactgtggaacagttgattgacccagagttttgattaaccaaaatattgttttaaaaaatcaggtgcagtgctaatgacactagagtagaaattcaacattttacccactttgactgaaaacttgcttgttatcatctttcttgtcaatgctgaatggtgagcattttcttccctgcctatttaatgggtttcctgtggagtcttatgcagaatttgtcaattcaagtataaagctatgatcactcagagtacgtggtggtaccttgctgctggggatgagggagtacagatgcgttcagatcctttttagtttggtctttctaaatgtttttactcagcttcacagaatcaggaattacagttagtaccactcttgggccattggatgactctggtatattgggttggtaccagagtaactattgttagaatatgtcaatgtggctacatcacctctagcgccataccatccaagtccaaattaccatcccctcctagacacctgtgacctaggaggtctagactacttggtctacctggatctacctggatctactctgtgtccccccaaaatgccaactctaatctatattttttcaaagcgtaaatctgatcacatcaactaccaccattataccctgcttaaacatctttaaatagctttatgttgctggaaatctttgaagtgctccacaaggccttgcacggtccctaccaactctccatcttcatcactctattccttgcattctccacaccaatctcactggtctttattcagtccttatgtttactgctcagcctcacggcaaggcctttgagtgtttgattcccgctgcctatgatgcttttcccctggctttaaatgtcagctcaagtactgtttcttctgagacaaattatctgccaccccatatctagacgaactctttgtaatagagcctcctagtaccaaaatacttcttatacacctttcagagggtcagttttatatttgtgagatcttttgattagtagcttccttttctctggacttgcttttttccccctttttgtggagaatggggtcttcctatattgccctggcaggtctcaaactcctgggctcatgctatcctcccgcctctgcctccctaaaagctgggattacaggtgtgagccactgcacccagcccctctggacttctaaggacagggactatggttgttttgactyaccttgatatccccgtcactcagcacaatgcttggtgcttaaaaggtacctaataaatatggattacatgattggccaaataaataaattcaatacaagtttaatcagaagatgggccttaccttgtcattkagggatttatctagttaagaattccagatgaatctctatcagaacagccaacagagaaaatgtattcagatgcaggaaggctagaaggcagcctgtagcagcaactacacccatttcactctgtattgggtcaggcaagacttcattaacaactgttcaaaatgcaggacaccattgatggtaatggttttggttagatgtggggacaatctctctgggactgcaggaaggttgttctactgttacagggctcacaactataaagtgtaaattattctctcctgtttctctgtttttgagggacttgtcatggatcccctattagaacaaagttgtggacacttagcaagttgtgtataaatgagctttcgttgttttcactgatccatcccaattagttcccctacttgtctgcatgctatctgcctaaggaaatgtgaaatatcttatttgcaaggagagatggaattcttgtgcatataggtttttttcttttcttttctttctgtttttttttttttttttggtttttttttttttttacattacttccaatttgcaaaggagagaagtaaacagtttgcatagggaaaacgcgtttttcgtcagtagmctgctgtggacggcaagagagaggagctttaccaggcattgaaatagtagcttttgtggtctcaggtcaragcatcgctctgtgtctctaggcagatttggtttaaggccaaaacaaatagccccccttccttgggttctgacccctgggggcagaaaagggaactaagctagtccagctgccactgcaggggaagtcattgttctctccaaccttctgggagctccaaataattaactgtgcaaagagcaagttggaatcagaattctcctccagggttttctgtgtccagccaaacagagcgagctgagctgagagacaaaaaaaccccgtgaaagagaaccagcgctgagtctcctttctccttccttgcttcagttctggtcccctggacctgtgtcctcagctacctcatctctcttaattcctccaggcccctcatcatgtgtagccagagggagatttttcttaatgagaagagccagcaggccactctccagtggaaggttggtgctttgggacttagaaggcttggcatgtggacagaaatctcccttactctcagaatttctgatgttttcaaagagaagccagaaatctggactgtggtgtgaagtcatccaagtttaaaatgtttgctctatgttttgtgtttatacacaaggtgcaggccaaacaaaacacatttttcctacctctgaactagaccataagcttcctggaggtgcagattgtgttgatcttgtttgctctggtattacccaggacctagcacagtacctgctgcataatarcagttcaacatctattgacctgcatccctaggagactcactatgctgtcattcccttgatattaatgacaataaagtacaacaataattagatcaatgactttttactgagcacatgttaagtgctttatatataatttgatctgcattatgaccttagaagctgtgtattctcactttgcaaatagagaaagcagctcagagcctaaaaatgtgacctcagccagttgcccagctgcagtgtagattctgattcaagcagcactgtgtccgaagccagggtttgcaatcctaatgccacagtgcctcccgctctgttctgctgattcccgccagagggagcaagggtgaactctcctagcgttagctcttccaaaagggagaaccaagcctgggtgttgtcaacttgccttcagggcagacctttgaaaggatgaatatggtcagtaggtattattttccttctgcatagcattgaaaaacgttcctacttttccatctccatctctttatgaggaactactctgcaggggacttcgattagttgtgattgtcatggtatactgtcatttgatatccttaagcgctacagaacagtccatatttaggcatcttctgaggactcaggggcagtctgagctgaggttcacagagtcattgtttggtgtccttaactaaatgcaaaagtggtgactcattaccaacttaggatacaatcaaacgcatgggttcctaaaagcagaatgctggttgtagcctgctggtcatgaaatacatttttttcttgtggtgcaaatactttattacaggtagtgaagtgttagaacattattctatgagagacacaaaagcctaattttacaaagtggggtagctaccatttgatgggcttatatttgttaatggtctcagctattgggagagacttttaatcaggagaaatggacagtaggaatgaagaatatagaccttcagaaaaactgaacatgctcttcccctgctttctatgtgggcaatgtctcaatgtctcttttgatttttccaggctrtcatcctggtgtgaagcccatttactctttcactaaatttttctctgatagaggaaggttttgcaagctggactattggaagtgaaaagtagctttttaaggacattcrttgtaattagcatcataatttcacttactgaggcatcatttaagaattttgcactcattccctcatgtggtcctttctaagaccttgtgacactcccctacttccccgctattttacagatgaggaaacaagctcagagtgccccaaatcacacagctgataagtagcaatgtctgactattgtttcaagtacggttcatgcatcagaatatcctgggaaacttctagacattaagtaaagcttcctgagttgcaaccttctgacctgctgtcttaattggaggggagcctgggaatctatttttcaaaagtcccccaggtcactgtgatgtacagtcagacttggaaaacattgccatatattataccatacattataccacactgaaataaatcaaagtacagattcagtttggaaatttcaatggttgctttttctggtccaacacagccatcccmacttgtgcctgagggctacagaaagtgcttttcaaaggaggtacattttgctagatcctaatgaatggataagaaggagaaggagaaagggcatttcaggcaaagtgaccacaggcaaaagtcacagagtcgaaactggacttgaagtgcctggggggaatgttacaaagtcmatatgcctgggcagatagtgacagatgtaaagtgtgtattatcagttgagtccgagtggagtctgtcttgggatgtcccagcagaattggcttcagctgtggagcacaaaacacctttctcattggtcagttttcttgacagcctgcttcagggcatccttacctgcatgcttctgccagaccacttgctgaagatgatcaggcaacgtgctgacagctcagatagggttcctgtctacaaactccttaaactcgattgcaatagggtcagatccactgtcaaaaatgatagtggatgagaaataacttggcacaacacagtaggtgctgaaacagaggtttgaggtgaaattaggaactctttagctattttgaggagctggctagaaatcagaaggttttcctcccaccccagaatgctcttgcaaaaacaggtggattcttgaagggaggaggtttgttcattctctgttaaaaagtaygtgactttgatagtttagacccagcaacttgtcttttcccattaattctaggctaccaaaatatatatgtccctggactttttttctgggttaatattgattagaggagtagagtgaatgcttctgtgatggtaagatgggaaggccacagagccaggaaccatttgcctcaaaacaaaaaacaaaacaaaacaaaaacccacttagaatgttactcctaggagttggttcatggtgactaaactcatcaacataaccccaagtggcccaaatggccattttaagcactacctctattcagtttccagggtacctgagtttgaattgcctttagtctcatttacaaaagctttgtcctcatttccttagaaggtattttgctgggtaaggactggtttaagagaacaaccctggtggagggaggaatgggaaatttcaactggggaaaataaaagatgttctagagatggatgatggtaatggttgcaaaataatatgaatgtacctaatgccactgaactgtagacttaaagatgattgaaatggcacattttatattacatgtattttactacaataaaaaagatcataataaaatggagaggcagcaatatcaatataacaatgctaacagctattgttcttacaatttttgctttgtgggaggcattgtgttcagcactttacataagttatttaacccttttaacaaatccgtgaggtaggtacattgattatctccttttcatagagaaggatttgaggattgaaggggttaatgaattgccaggggtcacgtaacaagcaaatggcagaatctagatttaaaaccaggcagtttcattccagagctctctcttttggcttatgctcttaggctaaaccacctcataagattgtcctttgagtctgagactccctgcacccagcaataaacaactgcagcaaacatctaaaatgagtcaaaattaccaaaaattcaccttatcaaatgtcagcaactttgatacatgtagtattcttttaatagcaaagagatatgctctgattcttgcctgtctttacagttcacctctctaatcagatagaaggatattctattatttattggaaagatggttacctgaacatttctcttttctttgatgtgaagttgtaaaatgccactttccacttaaacttgtgagcttctcaggagcaggaacagtatctttctacatggcagataataggtgctcagyaaaatttttgtcttgatgaatttccagtgataatgaaggtatctatgtaagttttcctaataattagggggcactatctgggtgtatggctcattaatttagatcctggaatgtacattctgaaggataaattagagattctcaactgggaataattttggctcttgagagacatatggcaatgtctggagactttttggttgttataattgagggagtatgtgtgctactaccatcttgtaggtagaggccagggatgaacatcctgcaatgcacaggacagcctccccartaaagaatcatcccacctcaaatgtcaatagtgttgatgaaacagaagagttccctggccccactcatggggcatgcgacaggggtgcggctctctgttcaaccaccatgaactcaaaccccttgtgggagagggagcacacagatggccaggtgcaggagcaagagtgagtgctttgggctccagtcccatggtagtgtctaggggtgggtgcctgtggccccagtgttacaatgctcttttagctctgccattcacagatagcttaagtgttaaccagctcagtgctccctctgcctttctgcaagggcagagggccagtgtgacagctttctgtatcccaagctcttgtccagcatcctagaagaattgggtcacacacaggcttgaaggatgcatgcaggggttttattcagtggtggaggtggctctcaatgggwtggatggggagctggctgggggatggaatgggaagatgatcttcccctggagttttggctgttcagcggccaaactcttctccgactgcccccagctgagttcctctcggcgttcagacattccttctcctctctctttctctgttgtgtcatttgtctgcttttctcctcttctccttgtctgctcctggagcctggggtccgggatttatatgggtacaggataagggagtgtggcatgccaaaaggcaaccgtttgggtacaaaaacagaaatgccccacttaggggccgcaggtctccaggcttgaggttggggcctttgccagggaacctccctcttctacccagtatttccttgtcttctgtctgtatcactggggagagaaattctgcttcagaggtcttattctctcattcattcatttcacatgtgtttattatctgcatccacttggtcagatgagcaagactgcttgtcygtgaccacacagctaggtggtacagatcgagaacttgaaccaatgtctcagggatagctcttcttcaaatgcatcaaggtggcctctgacagcctattactgattcaaatgccatccttgcggtcacggtaaagcaggtccttctgagacagataggactctgagcctgygcttggtacctggagctgatggaaagggcagtgatctaagacggcttgtttaggctgcagaaagtccctcggcttggactctctgagctcttgctcattctgctgaggcagggaccattttggggcctcctgtgtatgctacattccattgctgggccagttactcttcactgaactgtaatactatctcatccaccttgttttcacagggccctataagccatattatggactttgctgaaagaattatcatgttcgcacagctctgtgtttgcagtaggcttaggactcttttcagatttgagcactrgcggtctttcatgcgatctgcttttcaacacacatcacatgttctcctcctccctttcctctcccggtcggattccttgctgccttctgattatggtctgcctcagtatgcagagtcccacagccgagcttaacaggtactctacaattctcaaggtgctagagttgatggattttaatcaggtgagtgcagtttaatgcaaatgctcctttagccgaggttcataaaatgggctgcttaatattatggtcccaaatattagttcaatgctcatgacttatgtaaatggccttgctttggggttaggttaggggaaaatcaataaaaaccagctggaaatggagaaagcaactgtgtacttacattccattgtgatgtaaccctgctcccaccccacaatacctcgtacttatcctttttgtttttttgccagctcacttttctcccccacatttaaggtttcacagagatatgaaaagccaccctggttcctccatctattaaatgggaaatgcatatgaacaaatagaagaattgcaccatacgatgcagctgaaatacaatgttatcatycttccactctgaacatttctcaggatggtttatgtcccagcagttaatggcttgctattgttggtgtaccaacacaatgctattagcaacacagaattctcaggctttctgtttagactatcttcatgtaggctagccagaatttagatatttgtaaacggaatttgaacagtggcctttcttcacaatataaaattcagataagtgtaactggtcatggcccaactcttgtttattaattaaggctttataatatggcaccatttttggaagctgcagyttatgcaaagaagaatactaattacattctgcattttctgtaataatggggcagtgttttggacaatgcagtttatccagacaatgcatccggctcataatgtagtttattaacaaggaggctctgaatgtttcatgggagattgatacagctgtgaaagggtggcataaataatattcctggccaggctgggggcagtggcaatatgttgcatgctgttaacctcaagagatctccgaatagcttttatgtatgcctgctatatatttgttgacmattgctggatacaaaggaagctaagtgatctgggaaaatctatttggtaattttcttttcccattctcttagcacttgctgaggccttaaaaacaataggcctttgcatttgtatggattgtttttccttaggctccaacaagaacgtcactttaatattgttatcatcatggatttcttataatggtcatttgtgagaatcagaataggctaccattttttttctataagatatttttcttattgaaataattcacatagcacaatgtttatccgtttataatgtgaaacttggtggttttagtataaatacaaagttgagtagccattaccactatctaattctagaacattttcatcactctgaaaagaaacccctagccattaacagtcactgtccttcctctcctcctatgtcctggtgactgccaatctacttgctatctctgtgaatttacctattctggacatttcacataaatggaatcatatgatatgtggtctttgtgactagcttttctcacatagcataatgttttcaaggctcatccatgttgtgagatgtaacagaacttcatttctttttattgccaaataatgcccattgtgtggatatgacacattttgtttatccattcattagtaaatggaaatttaaggttttttttcccacattttggctgttaagaataatgtggttatggactttttaatttgtatgtgtgtgtgtacttgtatatttatttcctcagaggtatatacctaggagtagacttgctgggtcacacggtaactctatgtttaactttttaaggaactgccagatgctttttgaagcaccattttataatcccacttgccaatatgagacttcaaatttctccacagcctagaaaacacttgttrttgtctatctttttgatcatagccattctagtgagtgtgaagtggtatcattgtagagctgatttgcatttccttcttgactaatgatgttcaacakttttttcatgtgattataggccatttgtatttcttctttgtgagctaccattttaatctccattttagaaatgaggaaacaatggcactgagaggaaacaagatttattagggtacctgcatgaggtaatagcccatcagtattggaatttaagttctctcacttagctatgcaaaagcatagacattgagtacctagtaataaaataagctataagtgatttgcatttagtcttaacttctttatttacaaatgacagaaacctagctctaactgtggcttaatgaaagtaagaagattttggcttgcctatctataaagttaagagctttttgcctccagaatgattggatgcagcttctcaaagatggcatcagaaatatgtctctatcatctcttagttttctttccattgggttggtctcacgcataggcatggtctcactttgtagtggttagatggccgctagacgctcaaagtttttatcttaccagctcagaatgccagcaagattttttttaaattcttccctttcacaatagttccttcagtagttctcaaatcttagcattgagtagtactggactgactygaattaatgattggctccctgaatcattcatcggtgaaatacattgattggtcatttgctcattctcagtggggagtgaagttagctccatctacaccatctggagtcagaactggagaaggggattccccagaggaaagtgaggatgatggtaccagcacaatgaggaatgcatgctagcacaagtgaaactcatagatgtccattgtgctatgcagttttttccttgggccttgatcatttatcatttactggtttcctgtctgtaaatttagaaaagatacaggctctctgaaaagtaatttctggtctcttacaagtgaagggttaatcaaccaatccacataattttctccagtactgagagatcatttgttttaataaatgcaaataaggtttcttatagttaaaggtaattggcttttcattgtaattcttgatgctggtcattttgtgtctgagttgttcctaattgctttggttcagagtctgagaaatgaaatagccccttgactataactgtaactacaattataacaatttatttatttaaatcagcaatccctgcaaagtcatttacagtttgtttatttcagtatgttttacaaggtgcaacaaaagcagcctcatcacatagcaaatctttcttacaggattaaaagttaatgggtaaggtaagtctggcataggcattaaagtggaagcattgtttcttcttgactggtcaactttagagacaacttttcccattcgaagttatctatcctctaaaatatacagagattgaggccaggtgggatggctcacccctgtaatcccaggactttgggaggccaagatgagtggattgcttgagctcagaagtttgagaccttggtaacatggcgggatgccggtggtgccatgcctgtggtcccagcttcttgggggctgaggtgggaggaccttctgagcctgggtggcaaaggttgcagtaagctgtgttggtatcactgcactccagcctgcactcctgcacaaagcaagaccctgtctcaaaacaataaataaattaaaatatagagagactgagatgcagcagcagttgtatgttgttctctggcttttgaataataaattgtatgtgtaccttcatatgataggatcttcagctctcatgccaactctatttcttaatagaaataaacaagatggacacgatacatctaggataccatgttaaaatggtttctaagactgcattcagccttagaagaaaagaacgttgtgatcacttaatgawgtctgtcacaggcccaggagagtgaaacaatggcgcttgcattgtatattttccatccctgcttacatcttgaaaggaagtcccaatgctgaaagtttgtaggattgggacagttgctttgatacttcagaccaacagacggattcttcttkcattattcagataaagtgttttatgttgcctgtccacctaagtgttttaatcctcaagattaccttaactatggagacttgacttagacttaatattttgatccagaaatgcatcaagtatagaataaaaacttctatcctagcaagactaggaatacaaaatatttactcacagtatacatgtactgtctgctgggtgtgcaacattctgctaagggaatgtgaatgtggcaggagaccaagggtcctcggcattagaaatctatagtccaggtgtaattagagaaagataaagggctcaccaatggaccacagagcatacatactraaggctaaaagagtaaaacagtttggtaatgaggaatgaaggatagagtgatctagggaaaattatatggagaaatagtttcttcagcaacatctgaaaggaagtgatgggcatcggttggtggaaaggatggttggttgaggtgggtgtagtggtgaaaaagactgaaagctactgaccaaggaatgacataacccagaggtctcgatctgtcagctcactggcctaaaaacaaaacaaaacaaaacaaaacaaaaaccacacaaataaaaaaccagatgtgygctacacaggaatatagaaataaaatatattggaacaataaaagatttcaagcaaaaattagaaaatactagaaaatctggaagtttcacataaaatgcaggttttcttacttttctgtaataactgaaagatctgacaacattctgcctgaattcctagttggcaagaaatggctgagagggagtagcgattgccatgatacacgagtggtttgtcgcagtcttcacctctccctgcagtctcccaacactgaagtcaaaggttaattgctctctagcatcatgcttgcactgttgagactattcataaaaacttgtccagcaaagtttgaaagatgaaaaatacattttcagaagtctttgttaaaaaaagatgggggtgagataggatggggaaatagtgcatttcatatgcaatcaggccaggcgtggtggctcacgcctgtaatcccagcactttgggatgccgaggtgggccgatcacctgaggtcaggagtttgagacctggccaacatggcaaaaccccgcctctactaaaaatacaaaagaaattagccaggtgtggtagctcgcatctgtagtcccagctactccggagactgaggcaggagaatcacttgaacccggaaggtggagattgcagtgagccgagattgtgccgctgcactccagcctgggtgacagagcgagactytgtcaaaaaaaaaaaaaaaaaaaaaagcagtctttgcagacgctgccactgccgggagcaccctactatcagccatggtcaaccccaccgtgtacttccacattgccattgacacggagcccttgggccgcgtctccttcgagctgtttgcagacgaggttccaaagacagcagaaaactttcgtgctctgagcgctggaaagaaaggatttgggtgtgagggttcctgctttcacagaattattacagggtttatatgtcagggtggtgacttcacatgccatatggcactggtggcaagtccatctacaggtagaaatttgatgaggagaacttcatcctgaagcatagaggtactggcatcttgcccatggcaaatgctggacccaacacaaatggttcccagtttttcatgtgccctgccaagactcagtggttggatggcaagcatgtggtctttggcatggtgaaggcatgaatatcrtggaggccatggaacactttgggtccaggaatgataaggccagcaagaagatcaccattgctgactgtggacagctctactaagtttgacttgtgttttctcttaaccaccagaccattccttctgtagctcaggagactaccyctccaccccatttgctcgcagtatcctagaatctttgtattgtcgctgcaattccctttgggttccatgttttccttgttccctagctggattgcagagttaagtttatgattatgaaataaaaattaaataacaacaaaaaaatgcaatcaagtgtaattgttacagtaggtagctagtcagctagtcagatatgagttggggcagtaaagggacaccccacatcccaccaggaatgtcaggcgaccatcaggtgatggtcaggcagttgttaagatggttctctcaaataataattggttgcagctggcaccagggaacaatagtctcccaacagacagaagaaacctaaaaccggtgatcagcagcttcctaataagatctcaggaggtgggtgcgtgggatcaagtatgtgcactaagaggcaaaatggtggagtttaactggtgtatgaccttatagggacgcttgataggtaagggaagcatgcctcaagtgggtatgcataccactgcagtaaacacactgtgcatgcaggccacccagcacgtgaacagcccactccatgggaagactcaggggagaagggaggcaagaccctggaagtatgccaatatatgaaaccccaagtcaaaaggtcaaaccatgcactcgatctctcaagtcacycacttggccctcctccaagtgtactttacttcctttcattccagctctaaagctttctaataaactttcactcctgctctaaaacttgctttggtgtctccttctgccttatgccccttggttgaactctttcttctgaagaggtaagaactgaggttgctgcagacccatayrgattcactgctggtaacattctttgatgacgcatgactcagatatgttcggccagtaacgtactgctgtcttatttttattttttatttttatttatttatttatttttgagacagagtctcgctctatcacccaggctggagtgtagtggcgagaccctggctcactgcaaccttcgcctgccaagttcaagcaattctcctgcctcagcctcgcaagtagctgggattacgggcgcgtgccaccacgctgggctaatttttttttttttttttttttgtatttttattagagactgggtttcactgtgttagcctggatggtctctatctcctgacctcgtgatccacctgcctcagcctcccaaagtgctaggattacaggcgtgagccactgcacttggcctgtcttatttttcttaacactagacttctctgttcatttatttacagtacctcccagcacaaaaggcatttgagtttgcgtttttcctaggattagcaaaaagtgccaggtaggcgaaggcagtagggtggtgatggcggcagtggctctggaggccgcagtgcgagtcctggcctctgctccagccccactgtggtgacgctcgctgagctgctgttgctccagaacactctcctgaccatggtcttgggctatttcatcagcatccacgcacatgctgaagaatgcttaagtgagtcacctcaggcaccaagatgggcctcatcttcgaaggtggcttcctgggcatcaacgtggagattacaggacctaagaataaaaggatttataaaggagacaaagaatccagtgggaaatacacattttctgctcacatggatggaacaaatacattttgttttagtgaccgagtgtccaccatgactccaaagatagtgatattcaccattgatattggggaggctacaaaargagaagacatggaaacagaagctcaccagaacaaactagaagaaatgatcagtgagctggctgtggccatgacagctgtacagcacaaagaggaatacacgaaaatctgggagaggatacacagagccattagtgacaacacaaacagcccagtggtccttcggtgcttctttgaagctcttgttctaattgccatgacattgggacacatctactacctgaagagattttttgaagtccagagggttgtttcaaaagcctcttcctgatgattccaaactcatagtttactgtttaccaaacaccttggtgataacgtcataggccattaatttctatgttttaattttctgaactatacagtcacagcttatgtttctttgtgattaatagaaattggaagaaaacacctttttaggaaagtcatagtgaaaatttgacaattgattggcataatttcctaattaaatgctgcctccattatataggtccttccagaaattaaacactggaattgaaatataggaatatatatatatatatttttaaaatcttcttttccttttgttttgataataaaatgcagttagttcaggaaatcagcacaaagcctgatagtactttactgaaatgactgcattctgtgtattccctcattctgtggtttaagctattaaggattcattttgttgagtccttatgagaaacaatagtatgaatcctgacattttctatgcatgctcatggcagagctctctggcttgggtgtatgctgccaggctgggcacttttatactttgttttcaagttttgcttttaaaggtaagacttgccccagcacctattttcccccatacattttacattgwaccttaggactcagtcacctccacttaaaattgatgacacaagccgcatacaaccattttttgtctttattttttgcgtaactttctaaggagtctctgttaaagccagttctgtggttgtcccagtgaatggtggctcttttcatttccacactggcgcatccactttctccactcttggaatgtaggaagtatgcattcatgtaattggaaaaatctggatttctgaagccaraaggttaaagcctgttaaacttcattgcagtgatatacagccgctattttatttttgatccgtggccttcgggccactgtttaaccagggcactgaacatcagtgtcagcactagggtttttgtttttgtttctcttgggtctttcttttttggcatatgtgaattttgttttgtgtaaaacgaaatgactttctcttgctctctgataatgagtttaaaattaaaggagcatctggttttgatgtggggatgatccaggattatgttgtgactgatgtatattagttatttgtacatttctggagatctttgcaaggggaaaactacaagtaatgagttttatataagtaatttaaatttgttacaggttttcaggtttaggataagcaaccttgggtgagaacacctatgacactttgttgatgaggtgattgtttcaccttaggacaactgttgcatgccaattgtgtgtgtgtgtgtgtgtgtgtgtgkgtatgtgtgtgtgaaaacacttcaaaattgatttaaaagatgtaaattttaaattggtcaagtatctaatatgccccagatttagtaaataaacaataaacaattttttttaaaaaaacgacgcaaaacaaaataaaacaaaaacaaacaaactgcgaggtagaatttaatgggaagagcaaagagggtagtagaaaatttcaatctggctggaatacaaacgtctgtttttatctcattttacctgcaaaaacttgaaggaaaggcttaaatggtaaactgaagaatttagttttgacctgtctgaaagggtgggtattgagggtcagaagtattgttaacagaaagattaatgagcattaaaagaaaggagttaatgtggatctgccagaaatgaagtaaccagactagttttccttttgacagggttattggagtagaagataaagttgagtttgagaaatagtgtatttcagcaatgtgtatgtatctcatggtatttttgtggtcaacactgagaaatgtgacatagttgatagcacaaccacgaatttagagctggtagaagaatttttacattatgtcctgcattttaaagttttgccacaatgtttaagctctgttatgaaaatcaaaataggcattttccttcctatttggttatggacatactatgctccttttattttatttatttatttttgagacggagtctcgccctgtcgcccaggctggagtgcggtggcgtgatctcggctcactgcaagctctgcctcccgggttcacgccattctcctgcctcagcctcccgattagctgggaccgcaggcacccgccaccatgcccagctaattttttgtattttttagtagagatggggtttcaccatgttagccaggatggtctctatctcctgaccttgtgatccgcccgcctcggcctccgaaagtgctgggatcacaggcgtgagccacagtgcccagcctatgctccttttaaattactgttcaatgaagcaaatgattttatccaagttttaattgataaaatacatttggataatattttagtaataggacaaatgctctttgatcttttggatgaactttactttatagagtcacatagtaagttatctttgctttcctataatggggctcctgcgtcattaacattgtatactgatatagttttctgaccatacaaactctaccacagcatcacagtggagtcactatctgcttctattgctgttagctggattagtcttatcataattatgtctttgccatagctgctctggcttccctatctctttcttgtttatctcagttaaaatatataaaagtgtattaacatttcgatacactgaattctctggagcgttgtgccctatattaaattttagtttcctaactatagagaaagagtggagggacttggaacatttctgatactgagcttttattatattgtgagcttttattacattctgagctttaaggatccgtctttctcggtatgggtagaagtgggcaaactgaaagggaaattgttttctgcattctctataatggtttttatttaagaatgataaagcaatactcactaagcccagatcagttccacaacagacagtactgaaaatcccagtggaaatgcagtgatgtttctgtattgggaggaaataaacttcaaaatgttatttggtgtataaagttattataaatatattgaagacagcattgcctagtgtaaaaagactcaacttggagttaggttagccatgcttaacccttatgtgtctatttgcttctattctgaaaccatatagagacactattaggaggacaaacatagactacagggttcaaggtctcactctacctcttaagcaggtcaattagcactttacacatccttttcctcttatataaaatgggaataataatagtacttacttcatatgccttggtttaaataaattagttgtcatcttttaggtacctagagagctatataatgtaagactcaatacatgtcagctattattattgtatttatcattaaggacacagctagtatagggaaagagaattaaacttgactgacttttctgccataaagttatttgaatttgggaacatcaactgcttatctcgtctacattttctccaytgaaaactgaycagactcagcccactacccatctgggaaaacactcccaagatcaagttgctctatagttttagtcttttcaaagttattttttacttgaattttgccctatagacaaacayacgaagggtagttttgaaaattgatgccatctattatattattgtttaatgattcctaattttcmgattggaagtaattgacttcatatctcgatttctaatctggttctaattgacttattccatcaatcatctagtcactaatacaatttttggagtgttgacaaaaccctttcagcgatcaaataaatcttgattgatatcttgagtgataagatttcctaccctttgttgagttagaaggggagaccaatcctttgttgtcagcaacttgatcagaactgggaatgtcatctaccagtgctagattttggcttgtttatttttgtatatttygcatacgtgcttagctactgtttgttagaatttgctatccgacattacttgacctccactttccagtgccattccttccctcaatttttttaaatcggttttcctgcttgttctatgacctaaggaaaatttttttacatcagtaagccttaatatcatcatctgtaaaatgaagataatgattctacctatctcgtggtgttggcaggaagatcatgtaagttaaagcatgtgtagtgcttaaaagttaatgaatgttaaatgcaagtgtagtgtctggcacatactaagtacaaaatatctgctagttactattattattagcagcagtagcaccagtggtaataatggtggtactgcttcctgatatagcaaaatactgagcatattctgaaaatagaaaaaaagaacaccaattgcaaaagtttttataaaggctttcaggcagtttgtcacatacataggttctgtgttttggtacctgttaccttaatttgtatagacaaaaattacctgaaactatgtcttggagtgatgcaaaagatgccatagacaactggatatccacacacaaaagaataaagttggaccccctacctcacactgtatacaaaaattaccttaaagtatcaaagtcctaaatggaaaagctaaaactataacattattagacaaaaccatagggataaatcttcatgaccttgtgttaggcaatggtttcttagctacggtgccaaaagcacagtaatgcaagaaaaaaatggataaattggacatcctaaaaattaaaacttttatgctttaaaggacatgattgaaataataaaactaacccacaaaatggaagaagtgttttgcaaatcatatatctgataagaaacttggagatagaatatgaatataaaaagaattcttacaaatcaataataaaaagacaaatagcccagttaaaatggggcaaataggtctgaatagacatttctccaaagaagatatgcaaatggctaataagcccatgaaaagatgctcaacatcattagccatcagggaagtgcaaatcaaaaccattacgagataccacatcacacccactaagacggttattagcaaaaagacagataagtttgggcgcgttggctcatgcctgtaatcccagcactttgggaggctgaggcgggaagatcacttgaggccaggagtttgagaccagcctggccaacatggtgaaaccccatctcaactaaaatgacaaaaattagccaggcatggtggggcgtgcctgtaatcccagctactcatgaggctaaggcagcagaactgcttgaacctgggaggtggtggttgcagtgagtcaagattgcatcactgcactccagcctgggtgacaggctgtctcaaaaaaaaaaaaaamaaaaaaaaaaaacagacagttaatagtaactattagcaaggatgtggagaaattagaactctgttacactgccattggtaagtaaatggtgcagctactttggaaaacagtttgaaaatgtcctaaaagttaaacatatgtatgacccagaaattccacacttaggtagctattcaaggggaatgaaatcatatgtgcataaaaaaattgtatgcaaatgttcatagtagcactattcatagtagccaaaaagtagaaacaatacaaagttccatttactgatgaatggataaatgaaatgtggtatatccatgcaatgaaatattattcagcaataaaaataaatgtagtgctgatacatgttacatcatggaggaaccttgaaaacattttggtaagtgaaagaagccactcacaaaagaccacatatcatatgaccaattgtgaagtgtcaaaaatargtaaatccatagcggcagaaactctagtggttgcctagctgggtggttgggagaaaatgggtagtgactgtaaatggatatagggtttctttgtggggtgatgaaaatgtcctaaaattgattgtggtcgtggttgcacgactctatgaatataaatcttgaattgtacacattagattgattaacagtatgatatgtgaattatatctctaaaaagctgttataaaaacaaaaaagagatgccacagggcttgttttctatgaaagaagcttgaaatatgctagaattaatgctttgctcgctgctaccacataaattctgtgaggacttggagtttaagtctttgctgtatctagaaatagaggcacacaaatagaatgctgaatgagtccctgcattggtggtccccaagaccacttgcaaggttctgtaaatctctaggaggactcctaggactcagcattgttatcttctggttctgatttgctacagtgaaagaacacaaagtaaaatcaacatagggaaaaggtgcatggtgtgcagtctggagaaatcaggagtaagcgtccaagagtcctcttccaatgcagtcacacaggatgctcttagttccttaagcaacaagctgcgacaacaagtttgaagtgttgcctactagggcactcattagagactcagtgcccaaggctactgctgggagctgatctgcctagcacatacccaaattccagactcccagaaggaaagcaggtgttcagcataaaccacactgtttgtacaaacaggtgaggcatagtggccactctataatttaggaaaaatgtcatattagtgtagggaactgtttaccagctccaattcccagctgctaaccaaaggccaacattgcaaacaggccttctaaggataggccttctcgagcctgctctgtgttaactctttyctgcacaatgaatagaagactgccaggttccaaatttctgtattatatgcaacaagcctatatgtgcaaaaggtgttaggaggaggattcagcatgccrtgggaagagtgctgccttgcacacagctggcaatacaatccatgctcatctctgaggaagaagagtctagaggggagtctgccctctggattttcctcccgatgcccagaaacaagtgaattaagacttaaagtaggccaggaacggtggttcatgcctgtaatcccagcactttgggaggccgaggcgggcaaatcacttgaggtcaggagttcgagaccagcgccaatgtggtgaaacccagtctctactaaaactacaaaaaattcgctggatgtggcggctcctgcctgtartctcagttacttgggaggctgaggcaggagaatcatttgaatcctggaagcagaggtggcaatgagccgagatcgcgccactgcattccactgcattccagcctggtcaacagagcaagactccatctaaaaaaaaaaaaaaaaaaaaaaaagatttaaggtaacagttttcaaccagtatgatttttcccccaagaggacatacggccatgtctgaagacattttgttgtcacaactgggggtgggggatgctactagcatctacaaggtggagactagggatgtttctaaacatcctacagtgcacaggatagcacttcacagcaaagaatgacctaggccaaagtgtctacagtgccaaggttgagaaatcctgccttagagaatatttatagtgcagcttaagacagttatctagtgaatcttcaaggaggagtgagacaaataaggtaatcaggcaataactacctcaccttttatgcctgccccaactcctgctctcttttcttattacttgaagtctataacctgaaaatgagaaattctccatgcattctgcaatataaatgggctactagtaaaggatgctgtaagcagaatgaagaaggccccctcttctttgaatataattgccctgattttagggtttcagttctgtcgctcagatgggtggctcagtcattgactctggaggaatgtgcaaggatagaaatatcagccttcatattttcatcactgaattcctaatagctgagagttattcctgaccatatcatctctgagcctttcgtatttaccactgctgtttatagcctcatttccttccttctcttttcataatatcttttgaagtggaagctaatgtgaattttggtgctctccagctcctaactggtatgtctaacaccatcagattgaattaatttgaactattaagcatgaagtacatattaccatggagctgattccagatgtactattgttagtttaattgttatggctaatcattgattgtggtttttctgggtgcttgaaataataataataataatactcttttttatagtgcctttcatttgtggatcttgaaaagcctgtgtcctggaaccacttattgtaaaattgtcattatctgtgtattctcatttggctgaagttcggggaggactatgccagtgtatgattttaaaagccaagaaaaatttatattcatgaatcatgcttttttgttgttgttgcaatttaccaccttggaggaacagggggagggggaatttagcccactgggatattatttccagagagcaattctgttccttttataacaattctgaggcctttgtgttggcttggtatcagctctgacttggtaggttataattgtaaatggttctcaaattgtatgaggcctgcattctatgttgtttttcaaaccaaggcagtgtatgtgtgtgtgtgtgaaacccttaaaagagataaagcttctttggcaatatcacattttgaaaagttcaaaatgagtgagacatacagtacaaatatgtgtgttcttaatcatgtttttacatagcagaaggttggttatttggaagaggaggcctttgaagtacagtgtggtctcttgacactccaaatacttgagtagtgaagaagacagaaggtaagggcaaatgcttcccggctcacctatttcttggtgcctgatggaacactcaggagttctcacctttttttttagcagtaggaattaattgctcccacaaagcaattgcttcaacaaaacaattatgacagatttataatggaatcctgatgaattttgttaagtcatcacttaacccaaaggaccagagtcatcttcacgtgttaccatacttcctcccaacagtagttcaggcaacttggattttcccagaaaggttttcttctggcttgggtaatagatggagagtttccaccatctggctgctgtcaaggagccaggggaaatgaattgctagatttttactacaygtattcatattaytgcccctttctgtgggccacagactcatgccatgattaatgaggactcttcttgacgcccagtatgctattctctggaaggctgggagaccacagtgagacaacgagtaaagcagtcacactttggctgtacgttagaatctcctgtagagttttaaaatcctcaggtgcatgggtcccaccacctagagattctgacttaattggtctgcagcagagcctggacattgagaagtgtaacatttcccaggtgattctaattgttagcccctgttaagtactgcttggggtctagtttttagcaagactaatattcaaaatatattaccattggtactgcattaagtaagctcttgctctctaccaggcactgtgctaaatgatttacaggtttcaatccatttgattgtcacaataaccatatgaatgaacattcattaattccttcatttattcaacaaatatttatggggcacaggcaacaggtcaggcagtgtgtttggctgctgggtaggaggttcagggaaagctttcaggggagatgacatttgagctgacatctaaagattgagaaggagttaaccaggtaaagagttgaggggaaggcactgatgaccaggaggatggttttgcaaatattctgtatcgggaaggaggatggctagttcaaggagtggaaaaaagaatttaccagtgcttctggagcagaggaaaccaggtggagcatcatgcaagataagatatagaggtgggaagcgaccccctcaacagaggttgtagttctgtgaaaggcttttggcctttattttgagagctcatggaagctctgatcacatttgcttttcctgggagatctctctggttgcagtaagtgaaacagaatagaaggaagcaagaggagatgcattgtaatgagttgagtggccattgcaggagatctggagagaaatgagaacagcttggactaaggtaatgaagggaaagagacaggtaaggatatttgcgtggaccttaggacttgaggatggattcaaaggagtagasgatgaatgccatctccaagtttactattattacctccaatttgcagaggagctggtcaaagcgtatgagaatttgtgtagttcttctcaaactacagtgtgaggctcttgttgaaatgtagattctgattcagtaggttttcaatggagcctgaatttctgcccttctaggaagccccaaatgctgctgacgctgccagttcatggaccatactttgataatctagggcttagagaagagaaataacttcagatgtagtagagtggagcctgcatgtgaaccttgtctgtctccctacaaagaccatgatcttaatcataaactctacagctcctgaaagatggagagttatacagcaggctaagaaatttgsatttacctgtaggtgattggcagtcattgagaatgtgcaaacagacagaggtccgataagaaagtttatggtatggttttgggatatttcctataagttatttttagcatagatttttaaggtcmaattggagtgtagttaaaaggaaaaaaatagcaggcctccaaactttgtaagtaatagagatggtttattagatcatctaccctgtaatgagggtaataatttgttcttatttagtgtttcttgcccaaccatcccaaggcactttactaataagcatcatctttctttcagagctaaggccaatggagagaggctaagggacttgatayagtggggctggctgttgggcatgccttcaccatttctgtggcatctagattgttctaccacagttcaggtatatgcctgagcatttgccttaattgtttgacctgtctgtatcaatatttccctgggtgtgtcccagagaactctagcccagtcagaagctaaataaaaaagcatcaaagtatcaaaagtttgaaaaatgctgcatgcttttttcttcttggagaggtgtaatgcacattagtacagaagggctctgagaagttccacagtcaaaaaaatttgtttaattctatataactcatgagttttcaaattaattggaccttagaatgaccaacttttctctctctcccaactcttaacattccattaaagagttgttctgtctgatagagtttatgaaatgctattctgtaatcatacataactataatctttgaatgtatcaatatcagttgcctggggctgtgttcttttcatgagtgactggcagatttggcattttcgcatctagaasaacattataacctagtttttactttgcctttccttaagcccagtgcccttacaattgttaaaatacatgtctctacttcattggttagctggaaggaaaatcactgatttatctacatgttttcctgttgtctggaaggggtgagttgtgcttttgtttctttgtttccatgtgtttaattccattttggcagccatagaatgttcctgcccactctgtttcatgtgaaagatcccaggaataggatcattacgagacatgacatttacattgagtcatttttttatgttaagtgcataacatgaaacttcgaatggtttttaaaaatctgagtcagtttggtaatttgacagtaaactaagtttgtcttttctcttgaagaatcttgcataagataaaaccttttaaaaaatcagactatgtttagtaagcattcatataaaaccatgaaaatatggctaaataaatttcaagatgttggtgaaataacatacaaggttgagatccaataccatactgacagaatgaaaacaaatataacaacagaaaactatggaaagttgcattttaaaaaacattggctattttaaacaacaaatttatagctgttgaatagactctgtccaaatgatgcctgagtatcctaagccgtgtgtgtgttgtcttcagcttttgttgagytgatttcttgtagacagctataccatttttagtctagaaaaatggctgtcacattttggtaggtggcagagttggctaagtagttccttgaaaatacagatgctcaggtttctaattaggtagttcaagcatggcacaaagaaatttgtgttttcaaccccaagacaggtaattctgatgcacataaagttgaagaacaactgctctagaacacttaaagttctactataaccaagattcacatatgcaatttctttaaaaggcaaacttcaagctcaaatcttcgctaactgtatacctttgtgcaaggtgtgcagtgtacaacctgcgctgctgctcgggtagccctgcctcctcctcagatactctgtttgagtaggcccatgatgggtttcaggaatatgcattttcaccccacctttattaaggtatagttgacaaataaaacttgtgtatatttacagggtaaaaagtgatgttttgatatatgtatacattgctaaatgatgaaatcaagctaattaacatatccatcatctcataaatttttgtggtgagagtagatcttaaatgctactctcttagcaatttaagatctaacctcttaccaattttcaagtataaattattattaactatagttattatgctgtataatagatctccaaaacttacttatcttgctttactcaaactttgtaccctttgaccaacacctccccatttttttcctctcccacaccacagcccctggcaaccaacgttctactacctgcttctatgaattcaacttttttagattctacatataagtgagatcatgcagtatttgtctttctatgtttggcttatttaacttagcataacattccccaggttcattcgtgttgcagatggcaagatttccttctttctaaatgctgaatagtattccattgtatatacagtcatgtgccacttaacaatggtctggtcaatgacagactgcagatatgagggtggtcccttaagattataatggagctaaaaagttcctattgcctagtgacattgtagtgtgctaatatcatagcgtcacgaattactcacgtgcttgtggtgatgctggtgtaaacaaatctactgtgctgccagctgtatagcacatacaattacrtacagtacataatacttgataatgrtaacaaatgactgttactggtttatgaactatctactgtgctttttatcattattttagcatgtacttctacttattaaagaacagttaactataaaacagtctcaggcaagaactccaggaggtattcagaagaaggcattgttttcattggaggtaagaacttcatgcctgttactgcccctgaagacctgccagttggatgagatgtggaggtgggaggcagtgatattgatgataccatccgggtgtaggcttaacctaatgtttgtgtttttcttagtttttaacaaaaaaaagtttaaaaaaataatacaaatatttaaaaatataaaaaagcttatagaaaaaggatataaagaaagaaaatatttttgtgcagctgtacgatgtgtttgtgttttaaaytaagggttttttgcatgtgtgtgtgtgtgagtgtgtgtgtgtaagttttattgagacagtcttactctgttgcccaggctggagtgtagcggtgtgatctcagctaaactgcaaactctgcctcctgggttcaagtgattctcctgcctcagcctcccgagtagctgggattacaggcatgcaccaccacacctggctaatttgtttgtatttttagtaaagacagggttttgcaatgttggtctcgaactcctgacctcaggtgatccgcctgccttggcctccygaagtgctgggattacaggcatgagccaccgtgctcagccaaggccacattttgaatctagaaccacaatgctcaaagggtgcttcacagactcctggtgatccctgagatccttccagggagtctgcaaggtcgaaactatattactgtaatactaagttgctctttttctttttcactatgttaatattttcattaatgatgcaaatgtaatgttttgttttgttttttattattattatactttaagttttagggtacatgagcacaatgtgcaggttagttacatatgtatacatgtgccatgctggtgtgctgcacccattaactcatcatttagcattaggtatatctcctaaggctacccctcccccctccccccaccccacaacagtccccagagtgtgatgttccccttcctgcgtccatgtgttctcattgttcaattcccatctatgagtgagaacacgtggtgtttggttttttgtccttgtgatagtttactgagaatgatgatttccaatttcatccatgtccctacaaaggacatgaactcatcatttttttacggctgcatggtattccatggtgtatatgtgccacaatttcttaatccagtctatcattgttggacattttggttggttccaagtctttgctattgcgaatagtgcctsatatggtatggttttaggtctaatgtttaagtctttaatccatcttgaattgatttttgtataaggtgtaagaaagggatccagtttcagctttctacctatggctagccagttttcccagcaccatttattaaatagggaatcctttccccattgcttgtttttgtcaggtttgtcaaagatcagatagttgtagatatgcggcattatttctgagggctctgttctgttccattgatctatatctctgttttggtaccagtaccatgctgttttggttactgtagccttgtagtatagtttgaagtcaggtagcatgatgcctccaactttgttcttttggcttaggattgacttggcgatgcgggctcttttttggttccatatgaactttaaagtagttttttccaattccgtgaagaaagacattggtagcttgatggggatgacattgaatctataaattaccttgggcagtatggccattttcatgctattgattcttcctactcatgagcatggaatgttcttccatttgtttgtatcctcttttatttcaytgagcagtggtttgtagttctccttgaagaggtccttcacgtcccttgtaagttggattcctaggtattttcttctctttgaagcagttgtgaatgggagttcactcatgatttggctctctgtttgtctgtcattggtgtataagaatgcttgtgatttttgtacattgattttgtatcctgagactttgctgaagttgcttatcagcttaaggagattttgggctgaggcaatggggttttctagatatacaatcatgtcatctgcaaacaggaacaatttgacttcctcttttcctaattgaataccctttatttcctcctcctgcctaattgccctggccagaacttccaacactatrttgaataggagtggtgagagagggcatccctgtcttgtgccagttttcaaagggaatgcttccggtttttgcccawtcagtatgatattggctgtgggtttgtcatagatagctcttattattttgagatatgtcccatcaatacctgatttattgagagtttttagcatgaagggttgttgaattttgtcaaaggccttttctgcatctattgagataatcgtatggtttttgtctttggttctgtttatatgctggattacatttattgatttgcgtatattgaaccagccttgcatcccagggatgaagcccacctgctcatggtggataagctttttgttgtgctgttggattcagtttgccagtattttattgaggatttttgcatcaatgttcatcaaggatattggtctaaaattcycttttttggttgtgtctctgccaggctttggtatcaggatgatgctggcctcataaaatgagttagggaggattccctctttttctattgattggaatagtttcagtaggaatggtaccagttcctccttgtacctctggtagaattcggctgtgaatccatctggtcctggactctttttggttggtaagctattgattattgccacaatttcagatcctgttattggtctattcagagattcaacttcttcctcgtttcgtttagtcttgggagagtgtatgtgtcgaggaatttatccatttcttctagattttctagtttatttgcatagaggtgtttatagtattctctgatggtagtttgtatttctgtgggatcagtgatgatatcccctttatcattttttattgtgtctatttgattcttctctctttttttctttattagtcttgctagcggtctatcaattttgttgatcctttcaaaaaaccagctcctggattcattaattttttgaagggttttttgtgtctctatttccttcagttctgctctgattttagttatttcttgccttctgctagcttttgaatgtgtttgctcttgcttttctagttcttttaactgtgatgttagggtgtcaattttggatctttcctgctttctcttgtgggcatttagtgctataaatttccctctacacactgctttgaatgtgtcccagagattctggtatgttgtgtctttgttctcgttggtttcaaagaacatctttatttctgccttcatttcattatgtacccagtagtcattcaggaacaggttgttcagtttccatgtagttgagcggttttgagtgagtttcttaatcctgagttctactttgattgcactgtggtctgagagacagtttgttataatttctcttcttttacgtttgttgaggagagctttacttccaactatgtggtcaattttggaacaggtgtggtgtggtgctgaaaagaatgtatattctgttgatttgagttggagagttctgtagatgtctattaggtccgcttggtgcagagctgagttcaattcctgggtatccttgttaactttctgtctcgttgatctgtctaatgttgacagtggggtgttaaagtctcccattattattgtgtgggattctaagtctctttgtaggtcactcaggacttgctttatgaatctgggtgctcctgtattgggtgcatatatatttaggatagttagctcttcttgttgaattgatccctttaccattatgtaatgggcttctttgtctcttttgatctttgttggtttaaagtctgttttatcagagagtaggattgcaacccttgcctttttttgttttccatttgcttggtagatcttcctccatccctttattttgagcctatgtgtgtctctgtatgtgagatgggtttcctgaatacagcacactgatgggtcttgactctttatccaatttgccagtctgtgtcttttaattggagaatttagtccatttacatttatagttaatattgttatgtatgaatttgatcctgtcattatgatgttagctggttattttgcttgttagttgatgcaatttcttcctagtttcgatggtctttacattttggcatgattttgcagcggctggtaccggttgttcctttccatgttcagtgcttccttcaggagctcttttagggcagcctggtggtgacaaaatctctcagcatttgcttgtctgtaaaggattttatttctccttcacttatgaagcttagtttgtttggctggatatgaaattctgggttgaaaattcttttctttaagaatgttgaatattggcccccactctcttctggcttgtagtatttctgccgagagatcagctgttagtctgatgggcttccctttgtgggtaacccgacctttctgtctggctgcccttaacattttttccttcatttcaactttggtgaatctgacaattatgtgtcttggagttgctcttcttgaggagtatctttgtggcgttctctgtatttcctgaatctgaatgttggcctgccttgctagattgtggaagttctcctggataatatcatgcagagtgttttccaacttggttccattctccccgtcaccttcaggtacaccaaacacgcagatttggtcttttcacatagtcccatatttcttggaggctttgttcatttctttttattcttctttctctaaacttcccttctcacttcatttcattcatttcatcttccatcactgacaccctttcttccagttgatcacattggctcctgaggcctctgcattcttcacgtagttctcgagccttggctttgaactccatcagctcctttaagcacttctctgtattggttattctagttatacatttgtctaaatttttttcaaagttttcaacttctttgcctttggtttgaatttcctcctgtagctcggagtagttggatcatatgaagacttcttctctcaacttgtcaaagtcattctctgtccagctttgttccattgctggtgaggagctgcgttcctttggaggaggagaggcgctctgctttttagagtttccagtttttttgctcttgttttttccccatctttgtggttttatctacttttggtctttgatgatggtgatgtacagatgggtttttggtgtggatgtcctttctgttttttagttttccttctaacagacaggaccctcagctgcaggtctgttggagttgctagaggtccactccagaccctgtttgtgtgggtatcagcagtggtgtctgcagaaccatggattttcgtgatctgtgaatgctgctgtctgatagttcctctggaagtattgtctcagagaagtacccagccgtgtgaggtgtcagtctgcccctactggggggtgcctccctgttaggctgctcgggggtcaggggtcagggacccacttgaggaggcagtctgcccattctcagatctccagctgcatgctgggagaaccactgctctcctcaaagctgtcagtcagggacatttaagtctgcagaggttactgctgtctttttgtttgtctgtgccctgcccccagaggtggagcctacagaggcaggcaggcctccttgatctgtgatgggctccacccagttggagcttccaggctgctttgtttacctaagtgagcctgggcaatggcggkcgccccttccccagcctcgctgccgccttgcagtttgatctcagattgctgtgctagcaatcagtgagactccgtgggtgtaggaccctccgagccaggtgtgggatataatctcctggtgcgccatttcctaagcccatcggaaaagcgtggtattcaggtgggaggggcccgattttccaggtgccgtctgtcacccctttccttgagcaggaaagggaactccctgatcccttgcgcttcccgagtgaggcaatgccttgccctgcttcagctggtgcacggtgcactgcacccactctcctgcgcccactgtctggcactccctagtgagatgaaccgggtacctcagatggaaatgcagaaatcacccatcttctgtgtcgctcactctgggagctgtagaccggagctgttcctcttcggacatcttggctcctccaaatgtaatgttttttaaaactactggcaccatagcatgaatcaagacagtggcactgaactgtacttttggcctttcatttttcactgccatgcactatggttaaaaaaaataaaaagtcaactttttctaagaatatccttgttgaaaagtaaaaattattaatttaattgcattttgattgttgagtttttttttttttttttttttagcattctgtgtgctgaaatgggaagtatgcaraaagaactgctgctgtgtactgacatatcatggttgtctcaaggaaaagcacttgtgagactgggtagtgaaatgaaccagctaccttttatatggaacactatttttctgcatgaaagaagcattgaaagacaaamtataattaygcaaactcaagtatttaacatattttctttaaaatgcacaaagtgagtctgttgctttaagtaaaccgttggccagtatttgttgatagtgataaaattcaagcttctaagcaaaaattcarattttgggaaacttggatatgccaccatgagcttgacagcttcccaatacttaaagactttttctaataaaaggtcaatgatgatattgcaaatataattcttttttatatcatgcaatgaaaggtgtcaacatttggaagatctgcataatccaatgaaccactatttttgtccagagcaatgtgcactkttacaaaatttcacatggggaaakgatccattcaaaatgctacacagaccatggatttttcacataacagagcactaaaaatttcttgatgtggtttcgggttctactctgcaagtaacttttaaagaaactaccatttgttaagttttgatgcagtattagagaaaaaatccagttatttgaaaaggctattaaaatattccttctagattttcttggcacacttcaaccctaataatatatcacaacacaatgcagaaacagataggagaatccacctgtcttctattaggctaaatattaatgtgatgttgagacaatgccactcttctcactagctcttttttcgggaaaatatgtatatttacatgtaattggttattactgtcattttaaaataaattcatagtgttttgaaagttttctgttttaatttctaacatggtaaatatccatagatataaccaacataaccacaaactctttggggccttccacagtttttaggagtggaaatggatcctgagaccaaaatgtttgagaactgctgacctagagaaacattctctaaagtacgttccatagaatgctctgccttgcaatgcgctatagaaacccagttgccagaaacaaaggcaatataaagcaggaataatttgtggttgaagaagtttacaaatgttactagctacagccccccatggagattcacagttggtaatagcacattaaaagttcagcttgaacttcattccaatatcactctttcccaaactcttttgtccacaaaaacattttcccatggaataagctttggggaatactgttcccttgccaacaatgagtcttaacattttaaatatattgcaaagtgatggattaaaagtggtatgtcctcattaattggctcctaaagtctggaattttaattttagggccattcatgttttcctttagaacagcctccagccagtaacttctctactcaagccaccagggaggtaaaaggtttgccaattacaggatagggtttcactacattcgcctttttcagttcaataaatcagattgtttttcaggtctcaaagacaggcaaattcatgaaaaccartgatggtaaaaatatgtcatgggtgtcacatatcaatgaacttgggaagggtttctataggggctgaatacaactgactcagcaggttgctggcattacttgaaatgaatgtgcttttggtaggagctgatttcttctttccatgtaatggttagtcaatcatacatgctctctggtttggattcctctggcaaattgcccattagtaaggctgtgtaaataagcagagtctgttttaccaccacagatctttctcctagtaaatgatggtgaattctagcttaggaatccgtttgctgatactaattccataattactaggataaaattatacttgaatataagccttgccaaccactgtattttcactttgaatctatactaagaaataaacagaatgtgagttaaatgtgtatttatgaagatgttcactggagcattatttataataccccaagttgaaatcaactaaaatgctgacaaatgtggaaataattgaaaactatagcgtattcacgtaacaaaatgccacacagagttttaaaactctagcttttgaagactatttaaaaatatgcaacagtatacccaaactaatgtcaggaagataaaaacatcatgataaattttgctggactgttttccagaaaggacattccaatttacatcctcaccagcatctgtttgggagtgcttctctctctgcattcttgccaactgtgagtgttattttaaacaatattttctaatctgataggataaaaatgatatgttattcttatattaaggaggcattcaaaagggaagacagaacagtaattggcacttccagaagagactgctggactctaattgctaccttgtaggcagaacttttggctgcattgactgtagatgggttccctctgattactgacatctgacatctcctggaagasagttctagagcctrgggaagtgatttgggcctagaaattaaaaataaccatgaaaattccacctagttaaagttgtagtcatttataatttatccgtggatagattcaataaatactctgttaagktcatctctatccatgtgtaaaccccccaaataaacatttaatagacttagaggcagagagagaatatatgcctgtcagtctcctgtgtcagtggctttgccattataaagttatagtagatcatagaatcatctgtaaggtgattaaaattgtcatcacggtttccatttttcacatcctttacttaacagcatgtatgcaaaaggtttgcagagtgcctgtgggctttttggagctactaaagggactcgtttcctattccattccctgccacttaccgcagaggtgccagtcatgcctacagaaatattttgtcatagtcacactgcaactgggtagaatattgaagtaaatgtcaaaaatgtagccatgtgaaaagaatcagaaggcagtgttgttattcaaagagttttcttccggcttgggctcctgtctgcatggagcaggctggatgtctaatttcagcagtacaattaattctcggacaagatgagaaaagatgtaagtgccacaattgtataacttggaagttgcttcactaattcatgtgcttattttctttgcaatttcatctgaaagcatcttttgatggctttttgatgttgttgaatttttaaaatcttttgaatgatgaaaatggacaaaaacagaattcagcaaaatgtaaatgaatcagaccaaatgggatgcaagaatatattgtgcagatctggaatggaaatagaaatattttttcttcctttttgaggagaattataaaactttccatagtgtgtcagacatggtgtttcgccttctctgttcccaaacgtttaaaaggtgacaaaatgctgttttaaaatgtcgaggtaattattgttcactctgataataaattaagtgttcattctaacccaaagacttgtcctctaaccctgatatgatctttcaacaccactgtgaatttattttttaaaatcatgattccacttttaatgttttcacttttgcacctttcttttcttttttacttaaagttctgggttacatgtgcagaacgtgcaggtttgttacataggtatacatgtgccatggtggtttgctgcacccatcaacctgtcatctaggttttaagccccgcatgcattagtcctaatgctatccctccccttgccccccaaacccccaacaggccccgatgtgtgatgttcccctccctgtgtccatgtgttctcattgttcaattcccacttatgagtgagaacatacgctgtctggttttctgttcctgtgttagtttcctgagaatgatggcttccagcttcatccatgtagtgccgtctcttattataattatgataatatcctagatgtagatgttaaagaatattctggactgagtcatggaaaatagctattgtctgttaaataaaagatgccatgacaatggcctatgtgtggcttgaaatacatttttgagaaggctgtaacaaaaaataatatagttataatatattcttattcaaaggaaggatgattttcaacctttattatacracagagaggtcacagtattaagagggtcagctaggacttgctgggatggtgtgtggaggacagctggagagatggtgggtgtgagacgcatgtgtagcttcttaactgagctgtagaatgtttagactccgttcagtaattaagtagtgttttcaagcttttgtgtatatgtgtatacaccatttacacctacaggagtatgttcttcaaagccttgaacatatttactggaaaccatgaatttcaaaatagtatttttctcaaagggatctggtaatggcataaaaccaccatagccaagtgatccctagagaccaacgttgaatttcaaacccgaattcaatagaattgcttttccttttctattttttaaaaaagtacattaaatccaaattagtgtcctgtatttctatsatctttctctttcttgtcttatttttgtgacttctttttgcaacttggggtgacaagccttcacttcattagctttgcttgcctgactctgaaacaaggtgaaggttcttatttccctttggtctccattttcttatctgtaaagaaggttattgatgcctttaatgttgctttcatctctgaagttctatgtttatgtctccttcctcttttatcctgcttccattatggatttactgtgaggataaaataagaaaagtgtcatgaaagtagtttgaaaattgtaatgcagtgtaaaaatataaagtatgattgttgctatcttgtatcattctctgtggtttctcctatgtttacaagattgcattttccaggtgtgtagtaccttaaacttttttttttttttttaattccacagtggacttaacagagtatgtgctaaagaaacacctatgggttggttcattcttcagccagggatgtttatttatctcttggacagagtggcagtcatgtgaagctcaccagttaaatagtttaattttaggcatttcttgaggctaaagagcagacttatcagcctctcaagatatctctgagaagtaagaatatgttagttttccagagaatcaagtagttgatggtaagttttaacaacattattttttaggaagcagctataatgattaatcagacgactgaccagtaaggaaggtatgaccctgacagaattggatcactttattcttcctttgatttgtatttaaaatccaaatagaatggcattcaacaaattaagatgcagaagctaattgcaaaaaaaggttcatttttcaagttgtttttctgtctctttctgcctggagcaaagtcttgctctatgtaacaataaccccttgaaatgtcatttagatcagaagtgctgatgcagcactaatgattttagagcaaatatgttactctaatttcctccatctgctatgaataaaagaatatgtttgtgaagtctgggagagctgtagagaaaattgttttgtagaaaagttgaagatattttaaaatgtgtgcaggtgtgggggaaaaataattctttttaaaattttgtcaagtatctaaaaaaatagaagctttattgtagctcagtggaaatgtcataaacttttttagcatacttttgataagactttaggggagtagtaaatgacttgaagacaaaccatctaggtttcattgtgacacagtcctgatgattcaaataaaaacatttgctttggtttgtttagagattctaactagggatgagaactgctcttattcccttgatgattcattttattcttggaagactgtcgtcttctgatttaatgcatatgtagtcgtgtgggaggaagatggtatgtaccctcttagcttcccttggtcaactctgccaatcaatactggtacggctagattttttttwaaaaaaaattttatagccattcactttcaaatctaggaaaatgatgattctttagaaaagtatatatacattcagtattatattattcccataggcaaaataaaaacatttaataccaataatcatagaagaaagtggaaaattattaaacatgtaccactagaaaaaaggcaccaggcccagatagttttacatgtaaactagatatttaaaaacaggtactttaaaagattaaaagatacttgtaacatacgaaagctttaaaaaacagatattccctatggttcttaaacaattcaagactatagagaaaatagaatggggctcaactgtacaaatctagcaaaatgttatatcaaaacttgagataaataacactaatgagatattttatgctaatttcattttcatatgtggaagtatataattaaaaaatagcaacttgtatctatctgcttatgaaaacatgataaaatgtttaaaataggcttcatttcaaaaattacaaactggttctgaattggaactttataccattaattaaaagattaaatgatttgattatacaacatatgctttgttaatttcctaaaaccaccataacaaattaccgtttggtaatttggtaatgagtggcttaaaataacagacatttattgtctgtcagttttgaaagctagaggttcaaaatcaaggtaccagcagggacatcctgcctttgaaggctctaaggggtggccctcccttgccttttcctaccttttagtagctgccaacagtccttggcatttcttggcatgcagacacattactccagtctctgtctcctttatcacatggtattctctctgcgtgtctgactatatctctggttttgcttcttatgagggcaacagtcattgggtaggggccgctctaatcccttatgacctctaattactgtaatctaacaaattacatctgcaaagacccagtttcaaaataaagtcacttgagattccacatgactataaattatggaggactgtattcaactcagtatgcatactgataagaaatgtgataaaatgtattagaaatttctagcaatactctaaataaaatgggcatggaaggaagttaaacacaataaggaatatttataaagacctataatcaaacattacattaaacagtaaaatataaaagtcactcatattaaatcaggaagaatacacaggaatatttgctattagcactgttacttagcactgtgttatgggttctgcttgttgtaatcaaacaaaaaaattaagcgaagaaaatgatactctcttcactgtcatgtgatatgattatattcatagagaatttatgactgttacacagttactaagaaaacatgttagctggatgatcacaaaataaatatataaaaatcaaattttttctttatactttcaataactagttatctagaaatagaaaaaaattactttggaaacaaaaaatataaaatccttagtaacaatttaacaaaaaaggcctatatagaaaaaagaaaaatgttatggagataaaactgcctgtcaaaagagtcatactcatattccctaatagtttttattattataaaatgtcattcattcctataaaatagatatgttaatataatttatcagaatggcaacaggtttcatttttactttttcttctaaacattaaaatgtaatataaagttactgttattaaaatggtatgttgttagccacgagaacattttataaatgaaacagaaaaaagagaaacagatccaaatatatgaagttaatattcagtaaaagtgtcttttcagctggatgcagtggctcacgcctataatcccagcattttgggaggccaagatgggcagagtgcttgagccccaggagttagagaccagcctgggcaacatggcgaaaccctgtctgtataaaatatacaaaaaattagcaaggcatggtggcgaaaccaccttggcaaaaattataactgagaaaattatgacagtgaaagagatctgaccttactgattccatcttgcttctaacctccaagctttccttgttcattcctgggtgtaggctgaactaacttttgggaggaactcagtttatagtttaactttgaaaaaagatgataacagccctttcccaaaacaaacccccttcctgtctggggactagactgcctttataggactaacacactagctacaagattagaaattatggtttaggagtcatgcagctggaggctgcgagattctaaacctcccaaatcgctccacagggaaacatcactattggaaaacctaagatcagtacttgagctattttgtagaccctacactccatagatcagctggcaccacctagatggataaactgactcatctggtcttgtggcccccacccaggaactgactcagcaaaagaggacagcttcgactccctgtgatttcatatcccacccaaccaatcagcactcccccctttccgaccccctatccaccacattattcttaaaagtttggatccctgagtttgggggggagactgatttgagtaataataaaactcccgtctcccatacagcctgctctgcgtgaattaaactctttctctattgcagttccctcgtcttgakaaattggctctgtctaggcagtaggcaaggagaacccactgggcaattacagtggcacatgcctgtagtcccagctacttkggaggctgaggttggaggatcaccagagycagggaagtcgaggctgcagtgagccgaggtcactcccctgcactccagcctggacaacaaagggagatcctgtcttaaaaaaaaaaaaaaaaaagggtcttttcagttcagttgggaaatgtatgtttatctaataaaagatgctatgaaaattggcttttcatcagtaagttgtaaaygttagaccactattttttacaataaaaatctaaaaattcagatgaattaaatatatgaatgtacattaaacaatataaattttagaaaaataggaattcttagacactgatgacatacagttatataccatatttgagaaaaatggctagggatattaattggcaattcacagagggaaaatttaagtgaccaagagacatgcaactctgctcaactttactagtagttgtggaaatacaaattaaaatcacaatgaaataaatacttttccagtcaagtagttgacaaaattggaaaatattgataatatccatgcttgttaaaggtgcttagaaatggaagagtttcatatattgctaaatctggatatatttatcaaaattaatggtacacttgctctttgactctgcaaccttaattttgggagtcagtaatctctgatgtgaaaatgtatatttaaagatggctgcatttttagtagtggcaaaaaaaaatcaagacaaataacattaacataaaaacagcacatgaatagtgagattgttgaatatatttatactataaccatactgtgaaatattatggaactaataataataactaaatacatctatatgtgatgtccagcatgtccatgatatggcagcatctaatcatttgactaattggaacgatatgagaccgttggaattagaaagcaaagaatgactatatcaaaacctgtttgtatgtactggtatgaaactagaaaaagatgtagaaggataaacaagtaattgtttctattttttgttttgttttttttagttgccatgggaaaatggaattggaaatagtgctgggatagcgtattgacttattttatataccacatacatacatacctgtgtatttttttttttttttttgagacagactctcgctctgctgcccaggctggagtgcagtggcgtgatcttggctcatggcaacctctgcctcccgggttcaagcgattctcctgcttcagcctcctgagaagctgggattacaggcatgcaccccacacctggctactttttttgtattttttcaccaggttggccaggctggtcttgaactccatgacctcagatgatccacctgcctcggcctcccaaagtgttgggattacaggtgtgaaccactgtacctggcgtatgtgtgcatttttgtttaatttgttatgctgagtattgtttttaaaattaaaatgatttttctcattgtgtgtgtgtatgtgtgtrtgtgtgtgtgtgtgtgtgtgtatttatcttaaatcctaatggtgttgtactttaagataatgctttttttttwttaattttttttttattatactctaagttttagggtacatgtgcacattgtgcaggttagttacatatgtatacatgtgccatgctggtgcgctgcacccactaacgataatgcttttatcttatagaaaaatgggccaaaattcaaaatactttacaaattaccatttgaaacgtatctgaataatgattcacaaaggaagagttataaaacaccagtaaaactctcagccccattagttatcaaagcaataataattagagcaataatgacatttttgctcacactgacaagtatccaaaaaattgatatttctcagtattatacagtagagggaaatctacctaccttgcttagtaaactttctggaaggcagattgacaatattaaccaaaaggctctaataatgtttatactttctggtccagctatactatttctggaaagtaatactaaggaaataactgcaaagatgtgtgtatggatgctcatttcaattttgtttayagtagtggaaaaagctgtaaatctatgtactcataagtagttgggtatttaaataaattcacttaaaagttatattttacaactatacacacacagagatacccataaaacatttaaaaggtgtaatgaaaatttttgtataatgatacagattgttacttatggcatagaaagatgttcataaaacagttgattagttttgattgttatataatatcatctaattttgtgatacgcttatgtattaagatgaatgggagtataaacaccagactgttaaaagtcagtttctctgggtgatgtgctaatagattattttttatatttctgtattttttgaactttttgaaatgtgcttgatacacttttattaagaaaaatacatgaaagtttgtccaaaatcctaatttttaaaaaagcacacaaaggaccaaactggaaatgctttaaaaattaaaaagggtaggggagcaataaaacaatgtaaaatatatatagactcagtgaagaaagcatggcttattactattaatagtcttaatagtgcaagttgttagttgataatgtaggcctattgagagacctgttggaaggtttgttttgagcccattgttagcttaaatatctgaccttttctatttagctccccagccataggtagtttaacaaaaggttcttcactaacacatttactttatgcggtttgtttgggggtgaggtttgcaatttttctccagggagtaaattacttcatgtagcttgttctcaaacacttatctcagaagccgcacacctttctgatagaagccaaatgtcatgactgaaggtatgggacaaaagcctgatttatattcctgaaacgcctcttttatgttctagaagccaaatctgcattcttatggagtggtgtagaatgtcagtacaaatgctgtatctatgctgaacctggaaaggaaaaaaaaagccacactccacttctttatttagagtttgcattgagaacagcaagcactatttgaaaggtcatcccatttcaagtagcagatggataggaaaaaaagactctggcttttacaaataatttaattgwattctccttgccatttctgcaggcaattcaggatattttttaaagcattgatccataattatcgctcagagtggttagcattgttagacagatgtgtaattcyttgtgtgtataagggagcaatacagcatccattttacctatttgattgtcttttcttttactgtgtaaacaaatgcacataaaaacgacacatcattgctttacaaaaaagaagcaaattaattttttttccagatttgtttttgacttgaaactctcctttctaaggcatgctgtatttataatggtcagcttctttgccttcctttaagtaaattagtttgggtctaggtagcatacttatgtttatagtccgctggacacaaggggtcagaaaccatgaaacacaaatgtatcatattaatagaatatgaaatgaaatgactaagacttttaagaatgcattttatctgtggtttattttcctgtcttttaaaatatatatattatttgtaatctaaccatgctattctgattggtttacaattgccagataaaattcaggatgcccagttaaatctgaatttcagagaaaaagaatgaacacctttttgagtataagtgtgtctcatgtaatagattggagagtcatctcagaatgaaacatactatttaaataaaattgtgaaatataatttgtacaggaaaagtgcatatgacatgtatgaacagtttaatgaataactataaataaacacctatctcaaggttcacccaagtcaatacattgtatttctagcatccccagcagtcctctgaaaattccctgatctgaaccctctctctgatcatattagaggtagtcactatcctgtcctttgacatatccattttccttcattaattgatacctttattaccagcttaggtacttgcaatcactgtaagttctgtatattttaaattttatataaattgaattatactgcatgtatttgtaaaggtgaaatattaataattcaatccaatttgggggaaaatactagggataactttccatcaaattatacaattgacaacttgagtatacttgagttttccatgtaggagagactaaagggtaatcctttaaaagaaatcttaatgagtgcactcatgttgctagtgccacaaatatttacttttaaaaaaatactcttcccctcaaaatgtttgttctcccacgcatcattgattttccagaacttggggccagtccagtgatactttcactggatttctgttgtgttgatatcagtggagtaaatcacatcttcaacctaaggtcgtaatgtttaccagtaaatggataaagagccttttgatttattattcatgtagatatcaatgctcaggatgactaaggaacattcccttttatctcataaattttatctagtgacatttaaaaactgtcttccggagcccagccctctgatccacagactctctttccttttgtggatggcaccgtgttctgctgtcctcacttctcctttatcgccttaatgctgagaatggcacatttttccaagttgctttgaagagcaaccatcacaagagcaaaagtaataaaaagcaatttaaaaacagatttctggatgttctaggaaataggcaattttgcatggcaagcacttgaacccaggggtgatttattattcatttgactgtagtgaatattcatggcttttgcatgttaaattagaattattgagatttttgtttaccctgaagaagtatgggaagtcgtgtctttaaaatttgaatgtactgaaattcacttttcaacgtatggagaacttcctttctagaaggaaccttaaractgatctggttaaatctgctagggaatgtgtataaaaacattcagtgttttgtaagacctgtactgatatattttatatgaggctcatacatatagagccatggtttccttccttccttccttctttccttccttccttcctttcttcttttaaagcagcattaccctttactcaaagaaaatcttgcttgaaagttaaatatgtaaaagagctagaattactttgtttgcatacagagtgggactgggctgcacactctccttatctccattcctccgtacaaagcccttggttttccataatcrcagctttaaaaccattcatgtacagctgaatagtttgtcagacatgtatcagatactagtctaaacacctaacaaatattaactctttaattctcacaacaaccctcataatggttattattacttccattttgtaggtgagggaagtgaggtacaaagaagttaaatacgttgctcaagattacagcttgtcaatggcagagcctctacaatcttgtcccagcgtccctgttcttacccagaatgctttgcagcctctccctagcagcagcagcaattatgttgaactcttgttagggattaggcactctgctacaagctttrcatgaattatcacagctgatcctcccaaagcagccagtgaggtaacagtattatcccccagtttacagatgtaggaaatgaagcataaataatttacataacatttctacaaggggaagaccagcatctgaaccctcacagtttgactttggagcccattctcttaatcactatttcataagttctcatacaaatgaaaacatttatatatttcttttttgttgttgtttctgagacagagtctcactctgtcgcccaggctggagtgcagtggcacaatctcggctcactgcaacctttgcctcctgggtttaagtgattctcctgcttcagcctcccaagtagctgagattacaggtacccgccaccacacctggctaaatttttgtatttttagtagagatgggcttttgccattttggccaggctggtctccaacgcctgaccttaggtgattcacctgtcttggcttcccatagtgctgggattacaagagtgagccacagcacccggcctacctttatatatttctaaagtgttttaatggttttcttttttttattattattatactttaagttctagggtacatgtgcacaacgtgcaggtttgttacatatgtatacatgtgccatgttggtgtgctgcacccattaacccgtcatttacattaggtatatctcctaatgctatccctcccacccccacaccccacaacaggccccggtgtgtgatgttccccttcttgtgtccaagtgttttcattgttcagttcccayctgtgagtgagaacatgtggtgtttggttttttgtccttgccatagtttgctgagaatgatggtttccagcttcatccatgtccctacaaaggacatgaagtcatccttttttatggctgcatagtattccattgtgtatatgtgccatattttcttaatccagtctatcattgatggacatttgggttggttccaggtctttgctattgtgaatagtgccgcaataaacatatgtgtgcatgtgtctttatagcagcaatatttataatcctttgggtatatacccagtaatgggatggctgggttaaatggtatttctagttctagatccttgaggaatcgccacactgacttccacaatggttgaagtagtttacagtcccaccaacaatgtaaaagtgttcctatttctccacatcctctccagcacctattgtttcctgactttttaatgatcgycattctaactggtgtgaggtgatatctcattgtggttttaatttgcatttctctgattgttttctttctttctttcctttctttttttttttatttaatgttgcttcacattggctagtaatgcaaagagagcatcgggttttctgaggagcctaaacatagctctgccaggcaggatcatgcccagagaaaacagtaaaggtcagcatcttactgttccttacccatgtttttatggtgttcatattgcctttctggtctttcccaaattagctggtttaatttcctcagtattctttgcagctttactaaccaatgtcatcaagtaattatacttatttgacaagggctaatgcttcttctcctaggtcaatctatgttttgacttaatcctgctgggaataaaaagtcttcatccagtttgatgtttgcaatggtggaaatgctgggttctgttgcagactaatagtagaggatgcctctttctattcagtgctggtgtagctaaagagctatgccaccagaacaattgtgtccaatgtgcaagcataaaattatttttatagtaggaccagtgagaagcctgatgttgtaatatctagtacttacagatgaatgagtttatgctattcactaaactatagtgtactttgggcctttatctgctgtacagaaagtttgcaggacgaggtcaagtgaagagtactggctgccatggggccttcagcactgacaaggcagaaggtgctgctgtgttaactctgtaattatgtgtttattttagaaaagtatagtctactccttagacttaatatgcctttgtcaattccctcttaatatttacccacgagtttagcctctttagttaaatcttgggtaaacacagggattttcagaggctggtgagtagagaaatatctacttggtcacatcagaacatatagaaatcttgcttctactagcatcctatctagatagagagaaactttaaaaaatattgtcttttactccttccccaagggaaattactgctatacgaaattaaaatagacaggccatagtcatgcctatttaaagaaaacatttttacagttagaaaaatatgcccattttatgaaggtataatttcttaagtttgcattcacttatgagggagtgacttaggtggatcagcaccttatccaagaagggattgaagaatgaatgaaattaaattcatattggagtagtagcctctattatacctggttcaactttctataaaaatactcaagaagatatatgccaaaaagaagtcgctgccactaaaaatttgtttttatagtcaagctagtcttgattcttgtagagaattctactaatgagatgtttggtggaactagaatgaacaatttcaacaggtgattcccttatgctgtggccaaacagagggaagacctttaatcatttggctgctatctttcccctgcttcagaaacatgcaaacgctaatcagaaaagtgaacaagaattactatgcatgtaagtacttttgtgaagcatcacttttaatgaagacatcttttgcatatgcatgtgaagaatgcaaatagtggttactcaaataaatggtcatatattagttttctgtggctgctgtaataaattaacacaaactttgaggttcaaaatgacatagatttattattttacagtttgggaggtcagaagtttgaaatagatggatattagtgggctaagatgttaggctgaattcctttctgaggtctctaagggaaaatgtgtttccttgtccttcctaccttccagaagctgcctgcattccttagcttgtggccccctttcatcttcaayatcagcaatggccagtcaactctttttcctattgcattgctctgactattctacttctgtttttgagatttaatgacccttgtgattacattgktcccaccctggtactggaggataatctccctgttttaaggtcagacgattagcaaacttaattctatctgctaccttaattttcctttgccatgtaatctaacacattcacagattttagggactaggatgtagacacctttggaagrccattatcctgcttactaaatagggcagtaatatttttggaaatatgtttgtcaggatctgtcacagttaaagcactatatctatgctgaaactacgagggccttggggattgttgtttttcataatacagatgcaggtagtgatacaagatgagtctatgccaatcccaacaggtatgctaggtggaaaacctgctagaggatggaaattaggatataagttttgtaaaccaacatgtcatttagctgtaagagatttatgtttaagtgacacataaagacaatcttcatctttttcttggcaaacacggtctctttcatgataaactaaagtaaaaagaaatcattatggacaaggaaaagggaacagtatctcagagactcagagtaaatgttgacctcccaagatgatatgtcacagaaatctgaagggattttttgtcatcctcaacagcatcaggaaacagaaagtgaaatgagagaataagtttagattgtaaaaagtaggattatttggaaaaggrgatggattagtcaagaaaatattgtaaagagaccagaatgtcataacacaattgaagtctgtgttggaagctgaaaagaaatcactatttaaaaaacactcatggccaggtgtggtacctcaagcctgtaatctcagcactttgggagacaatgcaggcagattgctcaagcccaggagtttgagaccagcctgggcaacatgtaaacctgtcacttcaaaaaaggcaaaaattagccaggtgtggtggcacacacctgcagtcccagctacttaggaggctgaggtgggtagatcacctgagcctggggaggtggaggctacagtgagctgtggctgtgccattgccctccagcctggatgacagagaccctgtctcaagaaaaaaaaaaagaagaaaaagaaaaaatcaagaggggaaaaaaattgataatttctgttgaaatgaacaggtgcaataaaaattaaaataacaaaagagatgattaaaaatatagaaaatagagatcatagatttgaacacccagaaccaaagtaagaatcacagatgttcttgaggcagaagcaattagaacacaaatagtagtgaaagattaataaaagctcttcggagcacaacgaacaaacaaaaacaaaacccgataccaaaaaacaaaaattgaagggactttccrtactccaggcaacattaatgaaaagggttttatatcatttcaacttggtaattttttaaagaataaagtaaaaaaaatccttcacacacacaggcaaacaaaacagttagccttataaaggagcaaaaaatcagatattttttttttggccacactatatggtacaaaatattgctataaaacctactgcttagaacagttaggactctggatgaactgtagcaatctgtgcattaacagtctctctaggagattcttaaacatactaacatttaggaagcactgcccaggtaactgagagagaaattgaagttaagaattcagtaacagagacttcacagatggtgctgccactgggagccccgtattaccagctatggtcaaccccactgttttcttcgacattgctgtcaatagcgagcccttgggctgcgtctccttcgagctgtttgcagacaagcttccaaagacagcagaaaattttcatgctctgagcactggagaaaaaggatttgattatgagggttactgctttcacagaattattccagggtttgtatgtcagggtggtgacttcacatgccataatggcactggtagcaagtccatctacagggagaaatttgatgacgagaacttcatcctgaagcatacaggtcctggcatcctgtccatggcaaatgctggacccaacgcaaatggttcccagtttttcatgtgccctgccaagaccaagtggttggatggcaagcaagtggtctttggcagggtgaaagaaggcatggatattgtggaggccatggagcgctttgtgttcaggaatggcaagactagcaagaaggtcactattgctgactgtggacagctctaataagtttgacttgtgttttatcttaaccaccagaccatttcttctgttgctcaggggagcacccctccaccccatttgctcgcagtatcctagaatctttgtgctttcactgcagttccctttgggttccatgttttccttgttcccttccatgcctagctggattgcagagttaagtttatgattatgaaataaaaactaaataacaaccacaacarcaacaaaagaattcagtaacagagaagtggctggttgttaataattaaaccaagttaacaaaaagtgagatttaagtgattgtaactttaattataatactgaatgcaaatgtaaaactatgcttttgaaagagaaaatatgtcacacaaaataatgctttaataagcattaaatatttaataccttaatatttaacactaagcaataagaaacccaggatcatatttacaaggtccagaaataaatttgtgacaaattctcatttttctaggggtagactcaaatattctaaatatttgaaagttttaaaatgtattcgttcaacaaatattaatattctttttgatataccaggtgccactattagaaacaaaagtaggatgcatgacttccaaaccaatggagagagaaaagaatgtgcagcctgatctaaatcaccaagtactgtcgtcccttggtatctgtgaaggattgcttccagataccaaaatttgtggatgctcaagtccctggaataaaatggcataatatttgcatgtaacctacagactactttaaattatctctagactacttataatacctaatgcagtgtaaatgctatataaatagttgtattgtttagggaataatgacaataaaatgtctgtacatattcagtatagatgccatttttttttcctgagtgtattagtyctttttactgctgctgataaagacatacctgagactgggcaattcacaaacaaagacgtttatttgacttgcagttccacgtggctggggaggcctcacaatcatggcagaaggtgaaaggcaaggaggagcaagtcacatcttatgtggatggcagcaggcaaaaagagagagcttgtgcagggaaactcctgtttttaaaaccatcagatcttgtgagacttattcactatcaggagaacagcatgagaaagacccaccccccmtgattcaattgtcttccaccaagtccctcctacaacacaagggaattatgggagctacaagatgagatttgggtggggacacagagccacaccatatcactgagcattttcaatccatgattggttgaatccacagatgtggaacccacagacaaggagggccaatagtatataaaacaaagaaaaaagagtaaagcataaactacacaaagcatgaaataagattacagtgttacaaacatatcatttacggcaataaaaataaatagtataaagtcccccagtggaagaaaaattagataatttgaccatggccggacacaggggcttacacctgtaatcccagcactttgggaggctgaggtgggtggatcacctggggccaggagtttgagaccagcctggccaatatggagaaaccccaactctactaaaaatacaaaaattagcctggccttgtggtgagtgcctgtaatcccagctactcaagaggctgaggcgggagaatcacttgaacccaggaggtgaagggtgcagtgagctgagattgcaccattgcattccagcyggggcagtaagagcgaaactctgtctaaaaaaaaaaacaaaaaaaaaaacacaaaacataatttgaccaaatagtctatctgaatattgatgttcagcaaggggatagtatatgtttgtaaaaagccattttcttagtattatcatcctttggttaagtcttgccactgccatatattacctgaatgaccttgggaaatgcatctaacctatctggctttgaatttccttatgcataacataggaatgacatttcccctgtacctgatatgttgaaaagaggaaatataaatgtgaaagcattgtgtaaagctgaatctcattgtgaaatgtttattaaactagtctattaaaatacaacaactgtatatttcagctaaaaagcaaaatctaactgtagggtactgagaagaaatatacctaaaacaaagtaactcattagattaaaaaagaaagaacaatagaatggacaagatttattaggcagaagcgaaattaaaaaaaaaagtaatcttggcaatatttagatgaaatagaatcaaaggctataaaaatattaaatgcaatcaagaaggttatattttctttaagatagacttcacaatgaagataaggcagttctgaatttttattgacttggtaacagcctcaaaatacatgaaacaaaggctgttagaaatataaggaaaaattgatggaagtagaattgttgtatgacactttaatacacttttattgatctttcatgggtcaaataaacacagaattgatagaatattttaataatctaacaaagatgatttaataaatatttattaaattttgttctctagaaataagcaatacacttttttaaggagccatgaagcatttagaaaaaaattgatcatatattatatctcaaagaaaccatattaaattatgaaatataaagtgttaacagcctccatgttctgcytacactgaaatagagctagacattaatagcaaaagtttaaatgcaaaaatcagtagcttggaaaagagaaataatgataacaaaaaccaaatttttttctaaaaactccagattcaaacaggaaaggaaactatataataaactgttaggagagtaagaactctatgtatcaatattttaaatggctaaagctgtatttagcagaaaattaatagccctgagaactttcattattaaaggagagtaacaaaatcaatctgtggaaaataaaactaatgaattaataaatagagactccttttttttctgttaaataagaccaacaagcaaataatatttatttaatgagctagaaataggaggagcttacgcagcataatacaagatatttactggaaacctgtagcaaggtatgttatttaacgttaacrttgtaaatattactttcactgccacaaatgagatgagtgcttgtgatttttgtaaaagttaaatcccaaagaacaatttctgcttcccatgtagtctgtaaaccctcacaaaacacaaacagyagcaacaacaaaactctctgagggatctgaagaatgaacaaaggcagcaagattctcgaagggggttgaagacacctggaagtagtataggttaaatttcttatgactattatcctgaggtcaagccacaggtagggccacacagagtggctgaaactcctgtaggaagctcagtctttctggccttatgaaccaggggacagagtttggagcaaccccagctactggaaagtaagggaggaatgtcattaaaaagagggccagaaaaggagcattacaaatttttggtgtaaattctgctcaaatctctggctgacctttggaatatacatacacaggcagaccaaagcagtcagtgaatttgataatatcaatatagattttctctatgaagaacagagattgtatttttaaaaaggattaaaaaaaaagcaaccagagcctcaggttcctatgggataattcttttaacatatgagtaattggttccccagaaggaaaggtgatagagaatgggtcataaaaatattaggttggtgcaaaagtaatcgtggttttgcaattacttttcattacaaaacccacaattacttttgtgccaacctaatatttgaagaaacagtggccccacacacttcccaaaattggtgagagataaatgtacacgttcaagatgctgaggcacattgtaatcaaactgctgaaaacccaagacactatcttgaaaatagccggagaaaaacaacacactatatacatgaaactgcactgctaaatactgccaacctaccttcaaaaactatgaaagcaagaagacaatgaaacaatatcttcaatgtgctgtaaggagatawgactatccaatcccgaagtccatatccaaagatactcatacttcaggaacggagtcaaaataaagttgcattcagaaaaacaaaaacagaatatttattgccagcagaccaacttacactgtaaaaaatgctttgttctttgggatgacaagaaawaatagatgaaaactcagatccttatgtaaaaataaagaaatcataaatagtaagataaatataaaaatcaattttttcctcctaatgttttaagaatatgtatgtttgtttaagtaaaaactatagcatcatttttatgggatttataatacaggtagatgtaatttcaatgacaacttgaatttagagggagtttgtaaatagattcatacatgtgtgaggtttccatattgtatgtaaatagtataatagtaattctaggtagactgtaaaaagagaggttggattgaattcctggtaatatgtgtttaaatggaatgaatactcgttcttagaatgaagagaagtgtgcagaatggaactttgcaarcccttactggcccatatgtcacggggtggagatgtcaccattttctatatggctccagatcaagcaatctcttgacaaaaagcaagctggcttcgagtaaccttcaaacggagtgtaccaggccaatgcagaagacataacatggtttgctttctttctcccgtccattttagtatcttaagtaccagcagatagaaggtccagaaaaaagaaagaggatgayattgtaggggaggccaaattttctctcttagggttttttagctgggcctgaggattgaattgacataaggcagatcagcgggagaaaagcatacaaatttaattcattcaatttttatgtgagcacaagagccctcttaaggaaatgaaacccaaagacagagttgaaagttgaacacctatgtactgaattgggaaaggaatagaaaattgtgagtatgtgacaaagccaacgggcttgggctagggaggttaattgggtagagaagtaactaggaagataagggttactttaataaggtgtgtttgttcagatttctctcagcatcaacttctcgtctttgatgataagaacgctactttccctctggcgtagggaggacaagttatctcctgtttctaaggaaaagaagaaagctcagagtatattttttgtatctgctgtttttccaagtgtctttaagctcaaaatagtcaatatactagagcaacatattttggagtattgtgttctgaactccttcaatctttagcatttctcttctgtcattcttcaggctcttgagcacttttgagaaactaatatgaatgggaaagatgtaatatttactcccaggaaggttgctttggtgatctagtytgtgaactagactcaggaaactgtctgggtattggaaaggaagtcacggatgcgcaatggaatttgtaaaggggtggcacagctcttgaatactctccttggaagagaccctggcayggagagaacagagtattaacctcactctgaggttgggaagactaagggaatctgaggtgtgaggagggatggagacgacaggtcacacaatgtgatggaaaaccgcacatggagtggaaagaacatgaactctggagtctggaactcctatatctggacttgacaccgtattctgctatgtggccttcggtgagtgtgccaagtwgaatattggctctgcaaacgtatccacatcaaatttctagagcttgtgaatgtgaccttgtttgcaaaaaaaatggtccttgcagatatgattaaattgaggatcttgagatgaggaaatcatcctggattattttgggagacctaaatgctattacaagagtcccaccaaccaccagaagctgaaagtggcaaggaatggaatccctcctagagcctctggagggatctttgctcttaaacatcttaattttgggcttctggcttccagagctgtgagagccacaaagtttgtggttattttttattgcagccacagtgaagaagataataaagccagctactgacctctctgaatctcagtgccctcatctgtaagatagaatcagctagctactttatagcatttttccaggattaaaygagacatgtaaaatagaaaacaaacaaacaagcaaacaaagaaaagataaggaacatgctgagaaaaaaatatagacaccccttgtttgatgttactaattgattcctgatgatcagatgtattacccaaaaatgatttccttgagacagtttgccattacttaaatgggaaaaaatgtgttatatgtcaaaccaaccctctagtgaatttcttgaagtgtaagtaaaacacagtaaaataaccatagtagaacaataatgtcacactgagacttaaaatgcaggcatayctatatctcagagatactgcatgttcacttccagaccatcacaataaagtgaatattgcaataaaacaaggcacacaaacttttttgtttcccagtgaatataaaagttrtgtttacagtctatagtagtctagtatgcaatagcattayaaaaaaaatatgttatcttaatttaaaaattttttttgctaaaaatactggtgatcatttgagccttcagtaagtcataatctttctgctggtggagggtcttgccttgatatttatggctgccgactgatcagactggtggttgttgagggcagaartggctgtggcaatttgttaaagtaagaaaacagtaaagttttcaacatcagtggcttcttgctttcacgaatgacttctctgttgcatacagcactgtttgccagcattttacccacaataaaactcctttcaaaatgagtgaatcctctccaacccttctttatcaactaagtttatgtaatattctaaagcttttgttgtcatttcaacgatgttcataacatcttcttcaggagtagattttacctcaagaaatccttttctttgcttacmcgtaagaagcaactcctcactcattcaagttttattgtaaaattacagtaattcagtcacatcttcaagctttacttctgattctagttgtcgctatttcttccacatcttcagctccttcctccactgaagtcttgaacccctcaaagtcatccatgagagttggaatcaacttctcccaaacaccttttcatgttaatattttgttgtcctcccataaatcatgaatgttctcaatgacatccagcatggtgaatcctttccagaaggttttcattttactttgcccagatcaatctgataaatcactatgtatagtcttacaaatgtatttcttaaataatgagacttgaaagtcaaaattactccttcacccatgggctgcagaatggatgctgtgttggcaggcatgaaaacaacattcatttccttttacatctccatcagaactcttgggtgaccaggtacattttcagtgagcagtaatattttgaaaggaatcttttttctgagcaataggtctcaagagagggcttaaaatattcagtaaaccatactataaacagatgtactgtcatctaggctttcctgtttcttttcagagaacatgaagagttggtgtagtatcattcttaagggccttagcattttcagaatggtcaatgagcattggcttcaacttaaagtcaccagctgcgttagcagctaacaaaagaatcagcctgttctttgaagatttgaagccaggtatcgacttctcctctctagctaggaaaatcctagatggcatcttcttccaacagagggctgtttcatctctcttgaaaatctgcctttggccgggtgtggtggcttacccctgtaatcccagcattgtgggaggccgaggcaggcaaataatgaggtcaggagttcgagaccagcctagccaacatggggaaaccatgtctctactaaaaatacaaaaaattagcagggcgtagtggtgggcacctgtaatcccaggtacttgggaggctgaggcaggagaattgcttgaacccgggaggcagaggttgcagtgagctgagatcgcaccattgcactccagccctagtgacagagtgagactatgtttcaaaaaaaaaaaaaaaatmtgctgtttagtgtagccaccttcattagttatcttagctagatcttctggataacttgctgcagcatctatataagcacttcctgctttgccttttatgttctggagatggcttctctccttgaacctcatgaatcagcctctgctatcttcaaacttttcttctgcagcttctttacctcttttagccttcatagaattgaatatagttagggcctttctctggtttaagccttgggttaagggaatgttgtggctagtttgatcttctatccagaccactcaaactttcccatatcctcaacaagcctgtttcactttcttatcatttgtatgttcattggagtagcacttttaatttccttcaagaacttttcctttgcattcacaacttggctatttggtgcaagaggcctagctttcatcctagctcagcttttgacatgccttcctcgccaagcttaatcatttctaatttttgatctacagggagagacatgggactcttcctttcacttgaacacttakaagctgttgtctgcttattagttggactaatttcaatttgttgtgtctcagggaatagggaagcctgaggagagggaaaaatggctagtcagtgcagcagtcagaacacacaaacatttactgataaagttcaccatcttatattgggcyccataacacttacaataggaacatctaagatcactgatcacagatcaccacaacagacataataataatgaattagtttgaaatattgggagaattaccaaattgtgatacatagacgtgaaatgaacacgtgctgttggaaaaatggtgccaatagacttgctagatgcaaagttgccacaaaccttcaacttgtaaaaccacattatctgtgaagtgcaatgaaacaaagtgcagtaaaacaaggtatgcctgtacttaaaaaaattatatcctcgatcacttgtacttaaaaaaattatatccttgatgacttctacaattaacatgttataaaatgtttgctttgtacgtagtagctattctcacttgttttgttttcttctctacaattgtcttcagtgttttctcaacartttggggatttcaacaataagcaaaaaaagtaaaatggggaaggcactgggaaatgtgctctagtgcctggtggccaagtgtggctcacactgatggtatgatggccttttagcatcagcaacttctgaaatgggtgtttcgtgtgttgtcactcagcttgctttccaaaatatctatatattattctgatgttctactgaatatgttttgaaaatatcttgatgattttcctatatttccttttattgaaagttttgcagagtttggtattataaatctaaagttttgctacatgaacattggcaaaaaaaaaaaaaaatagatgatgaaatttggattttaaaaaccaagagtcattttaccatgaaaatgttaatcgaggcaacatcattcaggttatgcctgtatttgcagaatgtttcatagtagaaaattaatatgaaatataaaaagagttaatacaaacaagtaatcagaaataaaaatcaatagaaaaataactaaggggtctgaagaaacataaattggagaagcaacagaaatggacaattaatgaatgaaagaatgtacaactgcaaaagtaatcaggaaatgccttctaaaatcagcacagtatagctttttacatctatccaattgtcaaaattaaagggaaaaataaatctaacaattctaggtgttggagaggttgtaaagcaatgaagattatcattcacagagcaaactggtacagccactgtggaatatagtgtggcatcatccagaatagttgaagacatgcaactcccatggcccacatgccaaggggaatgtgcacaacatacttacaatagtatctttttgataattcaggaaaacgtacatgttcaccaatagctaatacataaatattattattcaactaagagacgattttcgaaaagcaaaaaaagaatgagtaaaaacaacatatagtaacaagaataactataaatatatgttgagtaaagatgttttgaaaatgagtttcagaagaatgcaatctaataccattatataacaatttaaaacatgcaaaaaaaaccccatcattttcagctagttggcaaatgtagtggaattgggcatggggatattctccctagaaaaagaattttttmatgttttttgatctagtaatctcatttatagaaatctttcttaaagaaatagagatgcaggcaaaaattcattattatactttggtattatagtatttatagaataattaagtactctaaattatctgtcagtaaacwgtgaaattgttaaataaattatggaacataaggtagtgttttaaaatctttcaaaaattatatctaataatatgggaaaattgcattgctatgtaatccgaatttggtttaaaaattaaacaaatagcaaaaaaagaaggcaaatatataaataagactgggaactataaaaacactatcaatgtttatctctgagtgatagaataatatgtgatttttaaaaatgtttttctgtaattctcaaattaggtgcagtaagcagacatgacttctacaatcataacaggtagcttcattgacctgtttctaaaatgggtagsactttttaaggattgaagttgttttgtccagttggacrgattcttatccctttgtcttttcttgtattgccaacttctgcctatacttgaaatagtagggcagatttctatatgtaagcatttaaagggtctgcaagaaatactaagccatgtaggaactgtgaatattaaatgagataatgaatgaaaagaagcctagcacagtccctagcccaagtaagtacctattattattattatcattgactttactacggctttggtgttatgtcacagacaaaagtttgcaaaccacttttttttttgcttgtttttttttttttaaggactcaaaacagttacctttgagtactaaagtccttaagatggaaaacgagatgatatttattatgccactgatawgtttcaggaagagcttgtggagagagcagacaaaacaaatggtaaatcttgttcttagaaagaaagagctatctgtccccattacagccagctgtcatgcccaggctggagccactcttgggacaraattagggacacttgaaaatggtaaatcttggaaactgagagctctgtatttttcaacttaggatcataatctattaacccctatttctatcccagtttttctcttggataactgatttcatttgtgcaacttgcattgagaaggtcaggataaggcctggaaattgtcaaactctagattttgatgacattttggtaactccttacaggaaaatctatcagttacatggtccaattgtaggggtgatatttactaattttgcattctattgaacagcgatatataatggaatgtatgttgtgaatcttcartaagtgtttcttttctcttataacccaatgaattgacctctataataacatgcagttgctaaatgaaaaaagaattgtatttaagcagaaaaaagttttagmaaatgtgattttgtatgccaaaatatgcatattagtagcttttatgagaagtgtccttgaaggaaaatatggtgaatttgtatctggttcaggtcttcttttaataaccagaaaacaaggctgaaacaagcacaaggcagttctatctgtttgaatgatataaattggttgttaaaaataaaaataaaatgaaaatgaaaaccaagataacaataccaaggataagttaaacaaaaagttggttttttgaaaagatgaacaaaattgataagcctctggctgtactaaccaagaaaagatccaaataaaagtcagaaatgaaaaagaagacattacaaatgataccataggaatacaaaagatgatcagagactactatgaagaagtgtacactcacaatctagataatgtagaggaaattgacaaattcttgtaaacatatgactgcccaagattgaaccagaaagaaatagaaatcttaaacagaccaataatgaatagtaagattgaatcaataattttaaaaccttccccctaaaatgcccaggactggatggcttcatagccaaattctacaaaatgtgcaaagaagaactgatactcatcctactgaaactcttccaaaaaaatcaagatgattaaataaagaaaatgtgctctgtgtgtgtatataagtgtatacatatgtatatatatacacacacacacatacacatatacatatgtatacacatatatacacacacaccacatgtatatacatatacacatatatacatacagcacattttatttatgtatatgtgtgtgtatatatgtatacataatagaatactattcagccacagaaaatgaatgaaaacatgtcttttacaacaacatggatggaataggaggycattatcttaagtgaaaaaactcagaaacatagtgaaataccacatgtcctcacacgtgggagctgaataatgtgtgtatgtagacatagagtatagaataatagtcactggagactcagaatgatgatrgggtgggaggggagtgaggtagtacaatgtacactatttaggtgttgattacattaaaagcccagacttgaccactatgcggtatatccatataacaaaactgcacttgtacccctttaatttacgtaattaaaaaattggctgggcacagtggctcatgcctgtaatccaaacactttgggaggcccaggcgggcagatcaattgagcccaggagttggagactagcctgggcaacatggcaaaacaccacctctaccaaaaaaatacaaaaattagctgggcatggtgccacatgcctgtaatcccagctactatggaggctcaggtgagaggatcccttgaacccaggaggcggaagttgtagtgagccaagatggcgccacggcattccagcctaggtgacattatgagaccctgtctcaaaaacaacaataacaacaataacaacaaaagaaaaaattatgctcactaaaagaaaaaaacagtaattaaaaaaaatgagttcttgtggtgaaacataatggcacctcctggttccttcttgcatttgaagattatagatgaggattttcagggaatggtcaagatcaaaacctatttggtctcccaagattttccaggagaggctgtaggcctcttcctagcttacctggcatgtacatactaactgcaggtagcagctgtatgaagttgttgggtaactcatttttggttgtgttctctaggtgacacattaggcatttttgtctacctttaagtcctccrttctcacctctggtagagtgtaaactccataatgagagagactgcttctgacttgtccacctctgtaccctaatttaatgaaaacatgttgaacaaataaagaataaacctagtggtggtcccaatcatccacctgcccttccaaccatcgtcctttccagattgcagccttctatatcagaagtgtcagcctttgttttcttgctctgggaagtgatgatttaagttccacaccaccaaaggattgtcaaatacacacaacaaaaataaacttgagctaaaattgtgatstaatatgcagagagattgaaaaagctaagaaaataaattataccactttggccatgcagatacaggaaccatctggaagcatctcagcaacctgaaagggagcatctgatgcctcgaattgccctgtccgtcagctttagctgctattcccatttgcttctcttaaatgtatttaacttgggacaagttgggagccaccttctcttttctgaggtgatcttagaagattgatatacgtaagttgcagcttgtttggattgtttatctgtatttaaaggctctagccaggcattgtattttgctgttaagataaaatcaataaataaaaacttaaaaaagaaccagactaatccttgaacattcctaaacatatactctctcctgctttcaaaaaggaacactgcttaatgtttacttattgtagtcttctgagaatttgatttgctgtgattgcacctttattcaaaagtacagaacctaaaaatggtacaaagaaagtttatttcaaatcagatgcatttgcaagccagtgtcattaaaaaacatgctgttggtaggctgaggtcagagtctatcatasagacagatgtgatttattgcaaaagagagcmgactactgcttaggtatcaggtgcmaccaatacataactaccaccaasgaarggctggttgtgatgacggtattggaagctggtgagtcagactcattacaattttcatgtaatctctaaacttccttgttaaactattttctactcttcgtaacttttgaaaagagagaatatgggagaacttgagcttcctctttctccttctctggcttcttttgttcccgggcagagacattagctagcagtcagatatctgagaacatggtaagagaaataagagcaggaagcctcggcaactcacttgataattatttttcatcatttagtagcaggtggtagaataaataggatcatttgtaaagttcaagtgttgatggtggtagtggagagagatactaaagcattttagttttcaagccacaatgaagtaactggtatcattcttgacctcatttcatgaataactataaaattagataaaatgtatgcggcaactgttttcagaaattggctaacaggcaatgcagggctgtgacccttgagacaaggtaaacccctgaggcaagccttgcattcaccttggctttctgcctaggggtgcattcactggactggctagtaaggargtggggccaagcattacatgcttgtttcaatgaactgataaggcagagtttgtactttgttgctgctgaggggctggaattagcagagtagggtactgaataagagagakgcatgaggtagggcatgtggaggtagtgtacatggaggtttctttgcaggtcattgtctgaaggattgactatgtataagcagggcaagacaccatgaggcctagcagagarggttcactgtgggaccaagagccgaacaaagacactagtggttgcccagagatgggagacgttggaattcttagtctgagagggcagatttccctgagaacctgggcattcagttgaaaccccagaaaggccagcctcaggagtgagacctgtacactaccataaggctgtgttctacaactaaggacaaawttgaactagaccagttctaacaatgaaaggttcaagagaatattttagaaatgtaatttcctgccagaaaaaaactcagtaccctataaggaagacaatataatgcagattccctaaatgtgtcgccctgtgtttagcatacaacaaaaaaattactggaygtgtgaagaggaagctccattaatcagaaaaaagcaataaatagaaacagactttgaaataactcagacattagaattagaaaatgaggaatttaaaataactagataagtatattcaaggacttgacataaaatgggtgacataaaatgaagaggcgggaaatctcagagaaacaaatgtaaactataawaaagaaacaartctatattatagaactgcaaataataatttccaaaatgaaaagtttactgaatggccttagcaacatattagaaactacagaaaagatcaggaaactttaagacagatcagtagaaattgtctgatctgaagaacaggaggaaaaaatagaaaaaatatatgaatcttcagtgatctgtggggcaaaagcgagaagtctaacatttgtacaatttgaggtccagaaatgaggatagagagaatgagggaggaaaaaaaatagtttaaaaaaatgaacaaattttcccaaatatagtgaaaaaatcaaactacaggttgaagatgtttagcaaaccaaagcaggataaaaacaaagaaaaccatacctggatgtatgacggccaactgataaaaatccaaaagtaaagaaraaagctgctgaggatgggaggagtggagagacattacatataggagaacaacagtaagagttattttagactcctaaataaaaactattcaagccagaagacaatagaatgacatttttaaattctttttttaaatttaaatttattttattttaaattctgggaaacgtgtgcaggatgtgtagctttgttacatatgtaaacatttgccatggtggtttgctgtacctatcaaaccatcacctaggtattaagccacacatgcattagctatttatcctgatgctctccctcccaccgctgccccccatcccaccccagacaggccccagtgtgtgttgtttccctccctgtggccatgtgttctcattggtcagctcccacttatgagtgagaacatgcagtgtttggttttctgttcctgtgttagcttgttgaggatgatctcttccagctctatccatgcccctgcaaaggacatgatctaattcctttttatggctgcataaacaaaacctaagttttagataaacaaaacctaagaaaatgtactgctagtcaacccgcattataagaaatgttaaagcaaattcttcagcctaaaagaaagtgaaagcaaatggaaacagattaacaggaaggaatgaggagcacagaaatggtaaatatatggaataatatatatatttttaaacygtctttattttctgttaagctcttacggggtaacttactatttaaagcaaaactcatgacaatgtattgaaaggattataatgcaaatagaagtaaaacatgtgacagcataatggacaaggaagtaataaatgtcaggttcttatattttacatgagatagtataatattaattttaggtagattttgataagataaggatgcatattgttagtcctagagcatgcaygcacacacacacacacacacacacacacacacacacacacacaygctacaaagaggtataattaaaaaccctaatagtggtataaagatggaaactttagaaatatgcattttaacagaaagaaggcaagaaagaaggaagaaggaaacaaaaaaagatggcataaatattcagatggtagacttaaaactgaattatatcattacattaaatataaatggactaaatgtcccaattaatagtcatagattgtcaatatggatactgtcaggcctctgagcccaagccaagccatcgcatcccctgtgacttgcacgtatacgcccagatggcccgaagtaactgaagaatcacaaaagaagtgaatatgccctgcctcaccttaactgatgacattccatcacaaaagaagtgtaaatggctggtccttgccttaagtgatgacattaccttgtgaaagtccttttcctagctcatcctggctcaaaaagcacccccactgagcaccttgcgacccccactcctgccagccagagaacaaaccccctttgactgtaattttcctttacctacccaaatcctataaaatggccccacccttatctcccttcgctractctctttttggactcagcccgcctgcacccaggtgaaataaacagccatgttgctcacacaaagcctgtttggtggtctcttcacacggacgtgcatgaaagatacaaaataaataaaacccaataatatgctgactacaacatatgcactttaaatacaaaaacacaaagagttaaaagtaaaaggaatacaaatatatgttatagaaataatttttagaaagccaatgtggctacatcaattacacaaagtaaactttaagacaagaaggtttaccaaagataaagagggacatatcataatgataaaggggtcaattaagaacaaataataattccaatttttttttcaagacagagttttgctcttgttgcccaggatggagtgcaatggcatggtctcagctccctgcaatcttcttctcctggtttcaagtgattctgctgcctcagcctgccaagtagctgggattacaggtgcctgccactacacccggctaatttttgtgttttttttttttttttagtagagatggggtttcaccatgttggtcaggctggtcacgaactcctgacctcagstgatccacttgcctcagcctcccaaaatgctgggattacaggcatgagccactgcacccggccaataattctaaatgtttactcaactaaaactttaagaactttcagatataggaatcaagagcgggatttttttttcaatattgtattatgaaaaaattaaacgtatatgaaaactgaagtaattttatagtgaacaccctgtgtaaccaccgcttggtgtctaacattaacattctaytgtgtttattatattacatttgtacctatctgttaccccttctttctatttgtcaattcatcagctgyagtgattttgaaactctactctgtaaagttccaggaattgtgtgtgtgtgtgtatgtgtgtattttggaagtggggtagtgttttgagaacactagtagtcctcatttgaccaaataatttatacttttatctattattctatcttatatattggacttctgtttaggttmcctgaaaacatggttttgtgagtaaaggaaaattttgaaagcttttatcaagggtattctgagggtaatccactctcccaatctagttaagcataatctagaaacctgaccatgtgttccttgaagacactgagtgagtgtacccaatttggcagcttttgtgagagcaaggaccatccttcatttttaattcccttcaggttcatgcctacagtgaaaagtcagtacatcttgctggatgaatgaaggtgggcaatgtatttattctatataatattgtattttgtgggcacacctgtgagaatatgacacaggttggacagttctacctggctcttagctatgttaattaccaactaattatgaggttgttttattttcagaaccccgttaagtccatttattaattagaataagactataaattccctctgtttaatccaaatttcactatctggcatcccccaaatcagaaatgttaacactggaacattgcttgctttcaaattaaataggtaagatttgaagagaactttggagtttaagaggttacatctaatgtgttctaaatattaggactcgtttttcttctgattacacccctacaaagtgccaagcctttgatagctcattttgtgttttctgaagttctagttctcctggtcacattctccagcaaggccctgtgtattaagtgtaaccagtaatggaaaatcctctacatagaatgtactcagaaaatttgaggagcttaagcacttgacttctctttggaaacacagtggatatttgtgtcgctactgtacacaaaggaggagacactgagaaataaagaaggttatcccaagtccccagtaaaacaggatgaggtttttaggtttgaggaaagtgcctcattcactccattcctgcctcaggatactgaaaggcaggtttctaggctgagttttctactgtaggaaatcctattttttacttatcaagaatgcattagagttggaagaattacagtcttcctacaccatatgctaatgttaattccagctggattaaagcaataaataaatgtataaaatcaatcattagaaacccagaatagaaatgagtatttatccctactggagtgagaggggacttcataaacttgaagacaaagagaaagatcgtttctgaaaagagtaatagatttgactccattaaaaattaaaacttctgtttgccaaaaagcaaatccacacagtgataagtatgtgccacagatatgagggacaagtgactaggaatcttaaaagaccaagccaattgataacaatgcatgattacaatggttaaatgggaggtcaggcatccattgttttcctgcctaatgctgttattttcaattctttcttgctcagtgggagaactcaattgcccagggtctcttcctgcttgcttttctatcattcctatttctgagccccagcaggggcctggtcttacattccatggcattccctgcctgaggccttctagctctcacatgcaatcttcagtgatgttttcgtgaggtctatttggggattcccagcaatgttgttctgtgccatttgttattaggtatgggtgttttatgctcatctttcattggacaaatgattgttttatttctagaaaagaaaattcatcatgttcccctacttcctatcttggatgcttgaaacatacatgtatgtgtatgttagtgtgtatatatgtgtgtgtttgtgtgttcaaggttttaagctagaagcgggtaatggctttaggaagtaatggtggggaaatctgtcacagcattatcacatgttcccatctgctgaaagcagaaaaatgattgtgagattgtgatgaccagagggaagtgatgaccaagtgagcytatgttctgaaccaggtttctgtaaatcacattaagcaagtttctccctgttactcctatgtccatttgcaaggatgaacacttataagtcatgtttacattctaccaacaaccactcttttaacaggtaggtcttgttccattgtacagccccagagaaaatatgcatgaacattcattcatgtataagtacctttaaggaagaatctgctttgttcaaggcactgtaaaatacacaaagataaattaccaagatgtttcaaatccgtggatgtacacaaataattataataagatctaaaagggttaattgccaaaaaatgaatggaaatatgcaattaaaatataataaacagatttctggtccagaaaagatgatgtagacccattttcccctgctttttcctgctaagaacaactaccaactctggtaatggtacaagagacaaccaaatgagagcgctgaaagacagtaagaatgagctggtttgctcacgcctgtaagcccagcactttgggaggscgaggcaggtggatcatgaggtcaggagagcgagaccatcctggctaacacggtggaaccccgtctctactaaaaatacaaaaacaaaattagccaggcgtagtggtgggcacttgtagtcccagctacttgggaggctgaggcaggagaatggcgtgaacctgggaggcggagcttgcagtgagaagcgatcgtgccactgcactccagcctgggcgacagagcgagattccgtctcaaaaaaaaaaaaaaaaaaaaaagaatgagctggcctccctaggcctggaggaacagcacagtagcagagtgtttaragtgtcccaacccaacagaagatggtcacctagaccgagtgtttcctaactgagtgtttcctaastccaagcctggcaacaagaagcagctcagggagrctgattttttttttttttttttttttttttcctgattgagcggatgtccctctggaactatcagacaagttcaacgctaccagccaaagagattaattggaagcctcgccaaaaataattggccagaggaaggactctgctctccctcagccctgagactctccctttccaccaagaaatactgaagtgggcaggcagaacacgtaaaaaaagaatgaactatagcaaataatactgtcagggaagcctctttttctctgtgtgcctcaaatgatcctcccctgtctagagtcactggrgcaagaagacataaccagcaacaaggatgcaaccacaaaaagtggccaattctaggaagcctctttgttctcacatgcctgagactctccttccctgcccaaagacactgaggcagatggcagaccccaccgtattcctctcccactgagagatacctgaggcccagtgtggggaaatctgttctgccccacaaggcagtggggtagaggcaggaaccagtggcctcttgcaaccagattaatcaagcagaacaaaataacacctcaaagtctgtgaaaattagagtgccactggagccacagctgataaaagtagccaagacccacatgattaatttaacrgggttactgactgttacaacgaaagacttaaataggacctagtctctcctatcataataggcaaaatgcccaggattcaataaaaaattatccttcataccaagaaccaagaaaatcacaaattgaatgagaaaagacaatcaactgacacaaacaccaagatgaatcagatattggaattatctgacaataattttaaagcatctgtcatataaatgacctataaagcagctgcaaatttttgatacaattttttaaaatagaaaatattagaaaagaaatagaagttataaaacaactgaataaaaattctagaaataaaaaataacagaaataaaaatagtgctggatagtattaacgataggttagactatctactgttaattagagataagagagggtagaattactaaatttgaggacaaaacaatggaatccacccaatcagagcaatagaccaaaaatagactgaaaaaatgaacaggaccccagagatctgtgagacaatgacaaatggcccaacattcatgtcattggagtcccagaagaggataaagataatgggactgaaagagtatttgattagctgacagccagacatggtggctcatgcctgtaatctcagcattttgggaggctgaggtggccatattgcttgagctcaggagttcaagaccagcctaggcaaaatggtaaaaccctgtctctaccaaaaaaaaaaaaaaaaaaaaaaaaaaaattaaccaggcatggtggtgcacacctgtagtcccagctactcaggaggctgaggtgagaggattggttgagcccaggaggcagaggttgcagtgagccttgattatgtcactgccctgtataataaagtgagactctgtctcaaaaaaaaaaaaaaaagaaaagaaaagaaaaaagaaaaagataaattgggcatggtgatgcacacctgtggtcccagctactcaggaggctgaggcaggaggatttcttgcacctatgaggtcaaggctgcatgcagtgagctgtgattgtgccactatactccagcctgggtgatagagggagatcctgtctcaaacaaacaaataaacacgagtatttgaagaaatgatgactgaaaacttaactaatttggtgaaagacagaaacctacagcttcaagaagctgaatgaaccccacacgtaatcccaatgaaatctgtgctatgatatatcataattaatcttttaaaaataaaatatactgaagaaatcttgaaagcagtaagagaaatgacacattacctatagaggaataccaattcaaatgacagcagatttctcataaaatggagatgagaaggaaatgccacaatatttttcaagtactgaaagaattatcaactgtaaattctatgtctggaaaaacyatacttccagagtgaagaggaaataaaaacattctcagatgaaggaaaagtaaatgaatttgttgctagcagacctactcttaaagattggctaaagaaagttctttaaacagaaaggaaacaatacaagatgaaatcttagaggattaggaaggaagaaagaacattggaaagacatttgtgggtacatacaataaactgttcttttctctttgagttttataaatcatgtttgatgattaaaacaaaaattataataccatctgatactcaattcaatgttattgaaaaatgggaaggacaagagatttaaatgggagtgaagtttcaaactagttaaatgttgataatgtagcctgtaacaagtcacatattaggttttagtactcagggaaaccacagtgaaaactatacaaagaagtacttcccaaaacactgtatatcaaaatgaaatcctaaaaaatgtttaggttacacacaggaaggcaagaaaagagaaacagaggaatgagaaccagaggaatcaaatagaaaacaagtaatgaaatggtatagtgaaatgctaacttatcaatagttaccttgaaggtaaatcatctaaacaccatcaaaagacagagataaacaaagtgmataatagaacataatctaactgtatgctgcctacaagaaactcacttcaaattctatgattagttaagttgaaagtaaaagggtggaaaaacatatatcatacaaatattaattttwaaaaaaacaggagtgcttatactagtatctgataaaagtggactttggaacaaagaaaatatctggaaacaagaaggaacattatataatgataaaagaatggatccacctggaagacaaaatgatcttatgtacataccaaataacagagcctcaaaatacacaaagcaaaaactgatagaactgaaagagaaacaaataaatcatcaattatatttcaggacttcaatgtcctctctcaacaacaaatagaactactatacagaaaatcatcaagaatatagaagattgcgccatcacaatcagcaaatagaatctaattgaaatatatagaatactccatccaacaacagcagaatatactttttatctcaagcaaccgaagaacattcaccaaaatagatcatatcataggccataaaaaatgcttagcaaatttttacagaatgtgttatccataacaaaaaaatagcagaaaaatctctaaaacatgaaaatttataacacacttctaagttatcaacaggtcaaagagtaagtctttaaaggcctcacatcaataacctaagttcctattttgagaaacgagaaaaataaagtaaaagcaagtagacagaggaaataataaggataaaagaataaatcaatggaattaaaaataagaaaaaggtagtcaatgagacaaagaacaggttcttctaaaaaattaatacaattgataaactactagcaaaattgacaataacaaaattaccaataccaggaaggaaataggaaatataaatacagatcctgtggtcactaaaacacaataaaaatactatgaacaactttacactcatatattcaacgaacatagaagaaatagaccaatttctaaaaaaaaaaaaaaaactagctaaactcagccaacatgaaatgaacagccctagcctagtcctatagctatttaaaaaattgaattaataattaaaaatatcccaaaaaagaaatctctaggactacattgtttcactggagaattataccaaatgttaaaaaaaaataatgccaattttatattatcttttctagaaaatagaagaggcaggaacacttttcaactcattattaccctgataccaaaaccaggcaaagaagaagaaggaggaagaggaagaagggggagggaggaaagaagactatagttcaatgtcttttgtaaattttgactcagaaattcttaatgaaataatagcaaagaataaaaagaattatgtaatatgatgaagtaggatttattatatgccaggtatgtaaggttggttcaacattttaaaattaattaatgtaatataccatagaaataagctacagaagaaaattcattgaggaaacactggaagaaattaaaaataaaaaaagtaaataatatcatcatataaaaaggcgtctgacaaaatccaacatctatttataataaaaattctcagcaatttagaaatagtgatgaattatctcracttgctaaagagcatccctgagattagaaacaaggccaggaggttcactctcatgacttttattcaaccagtactggaaagtctagccaaaacaataaggcaagaaaagaaaatagaaggcatgcagtttggaaataaatgaaataaatctctctttgtagatgatatgattgtctacatatataatccctagaaatctacaacaacaaaaatcctagaacaagtgagttcagcaagggtgcaggatgcatacaacagttaatcgtatttttacatgctaacaaagaatgtgtaggaaccaatatcaaaaacagtgtatcaattacaatagttccaaagaaaataaaagattcaggtatacacttaataaaacaggtacagaggccgggtgcagtggctcatgcctgtaatccctgcactttgagaggctgaggtcaagagtttgagaccagcctggccaacatgatgaaaccccctctcttgtaaaaatacaaaaaattagccgggcatggtggtgggtgcctgtaatcccagctactcaggagcctgaggctggagaatcacttgaacctaggagatggaggttgcagtgagccgagattgcaccactgcactccagcctgggcaacaagagtgaaattccgtctcagaaataaataaataaataagtaaataaaaacaggtacagagtttatataatgaaattacaaaatgctgatgaaagaaattaaagacttaaatgagtagagacttggaaggctcagcatggtaaagatgtcagttctgcccaaattgatctttgagaaattaaatttctaacaaaattctagcaaacttatttgatctccatttatatggaaatgcacaggacctacaatagctaaaacaatgttgacataaaataaagtgggaagaatcaaccaacccaacattaaagagatatatatctccacccaatattagggctatatagctatagtaatcaaaccaacatggttttggcagaagaatatacaaaatggaacagaatagaggacccagaaatagacttccataaataggctcaaatgatttttgacaaagatgcaaaagcaacttaatgaaggaagtccagcctttcaacaaatgatgctagagcattagacatccattgggaaaaaaaatsmrmmtygatctaaatctcatamcttcatacaaaaattaactcaaagtggatcatagaattaaatgtaaaataataacaattttaaaaaataaatgtgggagaaaatctctgtatgtaaggcaaggcaaaatgttcttatataaaatagttagaaatatacctaaccaaggaggtgaaagaccactacaaggaaaactacaaaacactacttaaggaaatcatagatgacgcaaacaaatggaaacatatcccatgttcagggatggatagaatcaatattgtgaaaatgcctatattgcctaaagaaatctttttctttcaaattcaagtcaattttcatcaaaataccaccatcattcttcatagaactagaaaaaaacaatccaaaaattcatatggaaccaaaaaagagcccacaaagccaaagcaagactaagcaaaaagaacaaatctggaggcatctcattacccaacttcaaactatactataagaccatagtcaccaaaacagcatggtactggtataaacataggcacggagacgaatggagcagaatagagaacccagaaataaagccaaatacttacagccaaccaatygtcaacaaagcaaacaaaaacacaaagtggggaacagacaccctattccacaaatggtgctgggataactggcaagccacatgtagaagaatgaaactggatcctcatctctcactttgcacaaaaatcaactcaagatggttcaaagacttaaatctaagacctgaaaccatacaatttctagaagataacattggaaaactcttctasatattggcttaggcaaagacttcatgactamgawacgamaagcaaaaacmaagataaatagatgggacttaattaaactaaaaagcttctgcacagcaaaagaaacagtcagtaaacagacaacccacagagtgggagaaaatcttcaccatttatacatctgacagaggaccaatatccagaatctataaggaactcaaacaaattagcaagaaaaaaaacaaacaatcccatcaaaaactgggctaaagacatgaatagacaattgtcagaagaagatatacaaataaccaacaaacatatgaaaaactgcttgacctcactaattattaggaacatgcgagtcaaaaccacaatgtaatactaccttacagctgcaagaatggccataatcaaaaaatcaaaaaataatagatgttggtggggatgtggtgaaaaggaacacttttacactgctggtgggaatgtaaattagtgcagccactatggaaaacagcgtggagattccttaaagcactaaaagtaaaactaccatttgatccaacaatcccactattgggtatctacccagaggaaaataagctattatacaaaaaagatacttgcacacacatgtttatagcagcacaatttccaattgcaaaactatggaaccatcccaaatgcccaacagttaatgagtggataaagaaattgtggaacatatataccatggaatactattcagccgtaaaaaagaaatgaaataatgatattcacagttacatgggtggaattggagatcattattctaagtagagtaactcaggaatggaaaagcaaatattctatgttctcactcataagtgggagctaagctatgaggatgcaaaggcataagaatgatacaatggactttggagattcaagtgagggaggagggaggtgaaggatgagagacgacaaattgggtacagtgtatactgtttgggtattgggtgcaccaaaatctcagaaaccatggctaaagaacctattcatgtaaccaaacaccacctatttttccaaaacctatagaaataaaaaataaaaataaaaaaacaaaccaaagtgtccttagatttaacaccaaaggcataatccacaaaaggagaattgctagattcaacttcatcaacattaaaacttttgctttgtgaaagcccaactacaaggaatgaaaagtcaatttacaggctggttggaaatatctgcaaaccacatattacacaaagaactagtatttacaatatataaagaactctgaaaagtcaagagtaaaaaaacccaaacagtccaattagaaaatgggcaaaaaacatgaagagacatttcactgaagagaatggcagatggcaaaaaaaaaaaaaaaaaaaaaaaaaaaaaaaagagcacaataaaagatattccacatcattagccatcagagaaatgcaaatataaaccataatgagatatcattacccatctattaaaatggctaaataaaaaaaattgataaggaggggattctgggaagatcaaaaagtagaaagcaccaggaatgtatctcctcacctagagaacaactgcatggcataatctgtctgatgtaactattttagaactctagagtctattgaaggcttttaatttccaagagaaggcttgggcagtaaattgcccttaactgtggttgactttagctcttagaataatatcagctactcataccccactcgcaggcatccttgcacagaktccaggagtagcctgcacacagtttatgggagccagggtgtgcaaaaaggccactgtcattcaaaaatcaggaatctgttctctgatagctaattgttgcttctgattacaaaggtgcagacagagccaggggccattgttgttgcatttccttccattgttgcaagccyttctttctccagctgaagtgacttccaggggatttaaagggctagcactcttttccttttgttttcattttttttcttttccccttttgtgtttggagccagacattaaagactagtacattttaaagcagccacatatacatgggaaattagaaagtcaccgctcatacctagagaaagatgcaggctcacaaaagatgtgagaaggacttaactttacatctcaggcttatcctcagcacagagacaacctacaacaattcagaatgaaaaagcaaaccctggggaaggggaaggagaatctgattttcacagttatcacattattttatttcaatgtccggttttcaacaacaacaacaaaatcacagcacataaaaagaaacaggcaagtatggcacattcaaaggaaagaaaatgaaccaacraggtctgtccctgaaaaagttataattgtggatctactagacaaagagtctaaaacaagtatcttaaagatgctcaaaaaactaaaagatatggaaaaagtaaaaaataaatgatgtatgaactaacyagcaacatcaatacagagattyagaaaaagtaaaaatagaacgagaaatttttcagttgaaaagtataataactgaaatgaaaaattcactggagatattcaaaggcatatttgaacaggtagaagaaagagtcagtaaacttgaagataggacaaggaaattatgagtcttaggaacagaaagaaaaaatattgaagaagaaggaacagagctgctggacaccatgaagcagaccaacatacccattgtgagagttcagaagcttaagaagagagagaaagaatagagagattatttggagacataatggccaaaagcttcccaaatctgatgcaagacataaacataaaaatccaagaagctcaatgaattccaaataggatgaactcaaagagatccaccccaagacacaagacacagtatactcaaactgttgaaagacaaagagagaatcttgaaaacaacatgagagaagcaactcattatgtagaaggaatcatcaatacgattatcagaattattgtcagaaatgtaggagtccagaatgcaatgggctgacatagtcaaagggctacagaaagaacaaaacaaaacaaaaaaaactgccaaccaagaatcctacattcagcaaattgtccttcaaaagtgagtaagaaattaaggcattctcatattaaaaaaaaaaaaaaagctgaggaagtttattaccactacacatgctctgtaagaaatgctaaaatgagttctacaggttgaaatgaaaggacactaatagtaacttgaatcttagttaagaaataaagttctccgtaaaggtaaaaatgtgggcaattataaaagctagtattattgtaataatgctttgttaactccattttttttctacatgatatgagactaatttttttaaattattagtctaaaagctagtattattgtaactttggtttgtaactccacattttgttttctacataatttgagaagctaatacatcttttaaaatatcagtttatattttagagcatattgcatgaagatgttaattttttgtcatcaataatttaaagaartggggacagagaagtagaggagcaatgtttttgtatgttattaaagttaagctggtataattccaaattagaatcgataactttaggatattaaatataatccctgtggtaactacaaagaaaatagatatacacaaggggaaatgagaaaggaatttaaatgtttcactacaaaaaataaactaacmacacaagaagacagtgatgcaggaaatgagggacagaaaaaaactgtaaggtgtgtagaaaatcaatagcaaaatgggacagaaggaagtccctccttatcagttggccttaaaaaggaagtaaattctgacatatgctacaacatgattgaaacttgaggacattatgctaagtgaaataagacagtcacgcaaagacaaatactgtatgatttcatctatttgtggtgctttgagtattcaaaatcgtagagacagaaagtagaatggtggctaggggctgaggagaagtaggaattgagagttgttaaatggtatagagtttcagttttgcaagatgaagagttctggagatagataggtggtgatggttgtaacaatatgaatgtacttaatactactgaaatatacacttaaaattgttaagatgctaaattttatgttatgtatgttttaccacaaaaaaattggaaaaaaataataataacgccaaatgctggcaaggatgcagaaaaattggatcaggaaaattggatacattgttatgaaatgtacctaaaggcaggccatgtgattaaaccacctaagggatggtggtggatatggaatctgatcagatattgagggtaatccaatattgaagatgaagggttctggataaaccagtctaagaggattcttgctaaaattgggcaatacagagaaagacacagaagtccaaaagttaaggcctgattagggagagaatcagaggagcctgattaacgtttggtcaaggagagactcttggtcaatagcagtactttcactgtacacagatggtacataatacatatttattgaatggataagtgacttaccatcatttcaccactagatgattcctttagtcattgactatctgccagacacctaagtttgcaaaatgagaaatcaaaggacccaggacaaggagctcattttgccttagtgcagcattgacaacctcccatttgaggtcagtgtttcccaagggggatctattggcattctgggcaggaaaagtcttcgctctgtggtgctaacacactacagaactkttagcaacattttgagaactctccaaatgtcagttttgccctccaattgctgagacatcaaagaaatgtcctcacctcctccatttcctagtgcctcctagggatactggttgagaatcagcactttgtctctttctaattattatagcyccaagagaacttaaggataaacataattcatgagctacatttcatatcctcccgtggcatggttgcatgtatgttataaaaagaaataggacttccttgccttctgagtggctctaagtttgagtttgaatttgtctaaagtattcatttggcttttatttgtcctggatgtttttttttgtgtggacataaaaaaattccctttcagaaaaatgctgctgagcacataccatatagcactctgcaaaccacctctttcaatctcaatagaagaaaaatatttgaaagggaaaagtattactggattatttttgtcaatgtgcaaaatctcttgaaaggacaattttctcttgttgactagcagaaacacagcagtgttaattaakttgccttgttaaatctgaaagaatgtacatagttaacgttggaaacccttctaattgcctttgtggaaagrcatcaaagggatctacaagcatcttgtttagagaagtgctgaggcttgagcttgggccaatgggacctttgggaaaaactcctggggaggtggagggtggagaaagccagaattatcatttcacgtattgagcgcttgacaagtttgtttccttttcctccattccctttggagagaggaggaggatgtgcgtttgaatggagagtctgtagaggtgccccaattcatttgggtgcgggcgtcctcatacttgctatcttggcccatggtagcaggttagccttctagctgtgggaagaggaaaaacaaatcttgcccccagtaatagagttctttcaaaagaccccaggcaaagtatgcagcttatatagaaaacaataaacacaaaatgatgatttgcattaaaaaatgaaaacactgttgctttcccataaatctagttctgggataggaatttggggtgaagagagagccccagaagtgtagaagaatgacatttgaggtaacaacaggagttcagaggtcctgcttttgtacccttcttgagtttcagatgagataaaaccagcagctctgctaagatgcagtgcaaaggcttacatggcttcttgagaaaagcaatttattttagattatagcacagcagctatcgtttaaactgctagggattgtaattgaactcagaaccaaccttttctgtgaacacagggtgcagtaataagtttacccaggctgttctaaataacatggacaccaggctttcaggacagaaaggcgtagtagccaaaacgtggagtcactagtgtcttgccaaccttccaacaactaaccccttccaaaatacattctgggaaatgtacctagctgtgcatccaaatatacacttgctgtctgctttctgtgatattaacatsaaatggctaggagacagcaatcttggggatgtgagagaatatgcaattagcacttggggacttttgttcaattcccatcttatctagggtcatgacagagcttggggtggggagttcgaggagaatacagaataaataaaactgttcctcttgatactggataatctttgatttgataatgaaggtgatgtgcttaccctccaaacccccgaatgtcatcctgtcattaagccctaatgaaagcttaattgttctgtcgagataaaatgatgtgtctcatttccgtacactgcatttgctctctcctcgttataaataaatccagttatactttattcgctattcctccagcgtgtccagtggcttagaagacagcatttcatacaggctcaattatgcgttgttgtttttagtaaaagagcttgtaacaatgtacttgctttttataatcataatttggaattgttttttatgaaagcaaaaataagcacgtagttaaaaatcaaatggttttgaaacacctgtagtgcaaagtaacagttcccagtcccacccttcccacctccagctgagctccctaaatgcaatcacttttcaacattcctggtcttacttccatattgctagttaacacttatttattttttatgttatctactgattttcttctaaagacaagaagtatttgccttacactaacttacactaaacttttcacatgctcccaccataacatgacattattctcaacttctattgggcttgccacttctaaattgtatttatacctcccctgattggtccatcaatctagcctgtgtctcttgcctccacacatcacaggatgagatatgggyactcaatacccttttcttcactgcttttcttttccttccactttccattctcggtcagctatataccattatttttgcattgtcaaatttaattgacatttgctctgtcaccagagtagtctttttttgtgatttttccaaagttggaaataatgaaaatatttgcacaattaagatttgctaaattatttagtgcagccccacatggtctctgtcacaattcctgtgatactcaaagacattgtgtctagaatcaggtgcaaatggattctcttcctttaaatcattttatcaaaatcattccaccttttagtttctgtaatatatatttcaagtttttcttataaagttatttttgttttttttgctggaatttctgatgtcctattgccttttctgagtatatacctcaataatatcttcaagttttttcaagctcataattacactctttgttctattggtcctgtctcttacagacctccattttgctcccatttggacaggtkgctctgtagacatgctgtgtagaatcatcctgagatgtccccattgctctccagggttggagtcactgtttgctggattgaatgggttttctttcttttctaatttgccttctgattttgctattaacttcctaagaaagggtgtgtattaggccatttttgcattgctataaatacctgagactggataatttataaagaaaagaggtttaattggctcatggttctgcaggctttacaggaagcacggtgctggctcggcttctasggaggcctcaggaagcttacaattatggcrgaaggggaaggggaagtaggcacataatgtgacgaagacaggagcaagaggsagagagagtggggaagcgaggtgctacacaattttaaaccaccagatctcatgtgaactcagagcaatagctcacttgtcaccaaggaaatagcccaagccatttatgagggatctgtccccatgatccaaacacctcccaccaggccccacctccagcaccggggattacattttgaagagatttgggcaggaacaaatatccaagccatatcagggtgaatgggaggtaaactttctgcatgcttgcaggtttagaattttttattttgccctcaaaagacaattgatagtttgggtgtagacttcyctgttgaaaatcctttttcctgtcttttagtatgcaatcctgctgctgctaagtctgatgctactctgattcttattttgtaggccaccttcttttttttttacttttcaggaaattgttaggaatttcatttttctaccactttacagttaattattcttggtatcaagtagattcctatactttgaacattcatctttctctttaactctggggaattttaccatgcaatctctttgataattcactccagtttcttttyttcttattgtgaaaatttggttagtcatccttagacctcctgaattgttcatctatatattttatttttttctcacttacttctgtacttggtctatagtctaggagattttttccaacgttgcctacaaactttctattgaattttttacttacgcatttataaaattccaaagagctctttcttatctgattattccttttcaatagaaccctgtttttgttttgtagttaccaaatctcctcaaatctttcttgacgatattaactagattttatttttaaagtttgtgtctttcccctaaactgttttctccagtgtcatgttttctgttgttttacttgctcattttcttttctgtggtagactttcttgtcatattaaatttctggtgatctgtggtgtgtgtgaaagaatgaggcaataagaaggctattgttgcggtctatttttaagtgggtgggtcttgtgaatagcaagcttgaagagtttcagtttagggtgtgtgcatgggaactggggaatcgcaatgtgctagagtaaggttttgttttgttttgttttgttttgttttgttttgttttgtttgagatgaactttcactctgttgcccaggctggagtgcaatgctgtgatcttggctcactgcaacctctgcctcccaggttcaagcaattctcctgcctcagcctcctgagtagctaggattacaggcacctgccaccatgctgaggtactttttgaatttttttttttttttttttttttttgagatggagtctcgctcttttgcccaggctggagtgcagtggcacaatctcagctcactgcaagctccgctcccgggttcacgccattctcctgcttcagcctcccaagtagctgagactacaggtgcctgccaccacacctgactaattgtatttttagtagagatggggtttcaccatattagccaggatggtctcgatatcctgacctcatgatccgccctcctgggcctcccaaagtgctgggattacaggcgtgaccgcgcctggccctactttttgtattttagtagagatgggatttcaccgtgttgaccaggctggtctcgaactcccaacctcaagtgatcccccctgccttggcctcccaaagtgctgggattacagacgtgaactaccacgcctggcctagagtgaggttttaacactaatgataactgtgatggttctccccacttttttattgccttgaagctggtgcttggcctcaggctagtccacatggagagccaggaggaagggtggtcaatgttacatattcatcctggcctgtaattaaccccccttttcagccccaccaatctcttccatcctgtgttgtacctgctatttctgaggctcgattctttctggaataaccaggcaggtyggccctcctttgccgcaatccytttttaggctgtggtttcctttgctgtgtggttcagaagccaacagacttttattcaaatcatttatcttctaatggcttcttcccattctctttgtggttatgagtttgcacttttgcatttctttagtatcatttagaaagtattttgggtgggaaaggcagtaaataggtttgctcagtggaccagtgtgaaccagaacactctatttttaaagacagagtttgtgatttttatatgccacatgtcaaagaaataccatgtagctcttcattttatgtcaaccgtttgttaatctaatgcttggaatgagcagatgcagaaagttgcaggaaggtttcattaattagatagagcttatacaaaatatacttggaaaaaaagtgtgttccgttcatttttctacagcctccaactgatcagcccagaagtttgtgtttcttaagctttagtgaattaaataagtttattaatttattttaaaaaytcattatttatttattgaaaaaaaaaamgattggatctatcaaaatgctttccttttttctcagtaaataaatgggccaagacctcaagagtagatctgccaaaggatggccacaatggccaatgggtataccraatttttcaataataaagattcaagttaaaataaattttaattttaattttgccacctgtaaaattaacaaaggtttgaaaatatgttttactgaaaaaggattataaaatgggtacttctatgtacttttggtaggaacaacaaaatttgttataaacttcctggtaatttaaaatgctcatagtatttaatctggcaattccccattttaggaatttaagacaagaaaataatcagaaattaagatcaagatggatttcttacaatgctcatcatagaataatgtataatagaaaaaccctaaatgacataaataaagaaaaaataaaatttggcactctataccatggaatattattcatacattaaataatgtttataaatagtttttaatgaattcataaaatgcttaggtataatttaggtaaaaaacaaaacaaaacttggaaatggtatatatatgaagtgctcaaccattcaaaaaggaaaaaaacctagaaggaactatactaacattttaactgtggtttttttgttggctgaattgtgtgacatgttttctttttttgcttcttaaaattttgttgcatttttcagatgttttctagtaactatgtttggttttgatagaagaaaaagaaaaacactttaaattatgtgcctctgaaagtaaaaatcttaaaaacgtcaccaaatgacccgcgtagttttcttcccctgaactttttcccttttctatcacagaagcaaaagtcgactgcataaagtagtatatgtagtgttttccattattgaaagtatttctcatgcatttggaaaagctaactagtacattatgttagatttcctgcctttttctctctgtatgtcacatcagatgtcgaaagtctgatttatttcaacattagctaaaggaatattcagattgtccagaagggggaagctatagctgtgtcttgaatggaattagagctgaagtgataaacagtggactgactaccagaccctcggctttagtcctggctagctcacttgatgactartctgggctttctcttgtgaaaaatgaggatgctgaatggggtgatctstaaggtcmtcttaggyctcttactccaacattgcaaattccttactatggaatagaccacaagaaactaagacaaagaaatgaytgagtgagaggcatgtgttctgtagtatgttttgttgacaattctgtgctttaagcagagaacatgggttttttgaattaatacttttacatccacttgaacaatgagacaacagaggtaccacaagcccaaaatagaagacagactgtattttaggcctagaaaggattatttgctctcagaagcacagtatagactgagttttctggcccccagaacataaagataagttctacaattaattttggtgcatttgtttcccytytttgagaagatgtacccagttggcggaattttgtgtgaaaacagaagccattatgggacaggtgctggtgctttgtgcagtgagagccttgttgttaggccctggttgacgtctgctttgcccagtaactgctgctaccctgctatccttcctactgtattcaagatccaaaatggaaattgctgggtttttttttccagattataaaagtaatacctgactattttataacaattaaaatttaaaaatccaacacaacagaaaaatattaaaaaatatcagttatcctacaacagcaataagcttgattaatatgcaggattttctcccacacgttcttattcacacacatacacacactcacacaattgacacatccagtaatactattttgttgttttattttaccacgtatcatgtccatagaattttatatcgtcatttataatttcagtatagtattacattgtatgagtgaaatataatacacttggcttggatcaccccctttgaatgacttctagtttgtgtgcaactttggttcttagaagcaatgctgcaatgaagaattttttgttttgttttgtttttttgagatggactctcgctctgtcacccaggctggagtgcagtggtgccatctcggctagctgcaagctctgcctcccaggttaacgcctcagcctcctgcctcagactcctgagtagctgggactacaggtgcccgccaccacgcccggctaatttctttttgtatttttagtagagacggggtttcaccgtgttagccagaatggtctcgatctcctgacctggtgatccacccgtctcggcctcccaaagtgctgggattacaggcgtgagccaccgcgcccggccgcaatgaagaattttgtatgtatatctttgcactgttcttcaaccatttctcaaggagaattttatgaaaatggaatttctatgtcaataatatataacatatatgtgtgtatatgtaggtatatatacttacataaacacaggcatacacaatgttaactgccctccataaaagttggactattaattcctccaccactgccacagctttattcctccacrtgccccttatcactgagtgaacctcagatgtttccaattgaagagagggtcaacaaactgcacctgagaagggagtctctggcttaaggcaggcgcaaacgcctttaggaagggccagatttgggagctgtcagtgggagttctgactcgctccttttttagcttttcatctcacattagctctctwagctctggagagttttgcagaacaagaaaagcaacaggagtgttttgcctttgctcctgcgatgcttcatcaagtaacasgtgtccagattttcactgtctactatatgtaagtgccccccttcctgtttacctggcatrtggtgtttttagcaatattcaatgttttctgtttgtttcctttgctttaggcttctaccctcccccaaatccttcacccccaactcctagactgcccacctgctacactagaccagggagataaagtaccacgcacaattgttcttaagcccagaccattgattttcctgagtttaagctggcatcatgagttgttaaccctgttagaaaaatacaagttggatttatgattcccttacacaggtaattgggctctaattttaaaatccaagccaattgatttataccatattgcattataaataacaaaagcgcagttcagtccaggtgacgtatgaatttgagcttccaattacctgataaattttcagttcattgataagtgatacctaggtggacgtcaacctgttgtggttccctctacccactccctgactccccaccccattgtcgtcccatctatcctctgtcctctcatttttcccttttttcctaagcttgaaggcttaggagtgacctgcttcagaagtccaaaccctgcatattgagacattatcaggacttttgtgtcttattcttccccacaaactcttgttaacattttatttcaactcacagtgtatttctgctgggtcactattattgcattgattataatatttgctgttaagccaccaggtatataaattgctttcttggtgtatgacaattcatccccaagattactagcttttcccatcctttttcctcctttgcaataattttctgcattgtatgtattctacatatttctgtaaaacatatcaagttatttttggaacaaaggttggctataaacaaataacacatactgctagaatcggtttctgggagtcttgaagagttatccagcaatcagaggcagttaattggaatctctatttcaaggtgtttttcttcttttggcaagcccttgttattttgagcaggggactattttaagtaatcctttgaacatttgtcagatcaaggggcagaggagaggacaaccagggataaacctgggcaagtggaaagaaccctggacttgagagcctcgagtaccagagtctcttcttctttctaggaggccttgggcaggtcccttcacctctctaaatctcacttctcacatttgcaacatgatttccttatctctgaggcccttcagaattgcaggagctaaatctaaaggctgtaactttggagaaaagtctaatctctcaccccattatgactttctgtgttacttttaactcccacccttctgaaaaacaaattacctgctgcagagtatttgaaagtgctcaggtattggatggctaccctgtaagaaatattttctgcctcacgctaaagcaagtaaagagagtagactctctcccatgcctttccacaacgatatgttttcctagtgttcattgctaaaggtatatttcttaggagggccatgtagggatatggaagaaatatgtgaagtagyagaggaagctgttaggaaaaatctgtattgtattaaacgaagagctctcttgctgtatgtaggaccacttcttgagcatggccaattctgagctattttaaaaataaactagagcactgtgattgctgaatgatagcattgcagtttcgctctatatgctctgggttatgtaatccacattttctcttcttttctggtaaattgtttgaagtaatgcaggtgggagaagtgttctgatttgaattaaggccaggtgaagacagtgaaataatcagttactttacagttttgcttttttcccccacttttacccttaaccagtcactgtgagtaacgccatgtcaactctgctctctagtaacattggtggttctttttctttcaaaaaattttttctcacttttttctaactcctctaaaagaaattgtttcccccacaaaagaaaatcagaattatttttataaagttctcagcagctctttaaaatattctttttggctgatgaatccagtcacttttgatctgtgagcataatggataaaaaacttgtatgaaattgaatctgaaaatktcattttattgtgaatagatccaaaatgttttatttttgacagtcccagataaaggatgatataattaggcatctgacttaactatgagagaatttttttcttaggcaaattacacggttgtttttcaaatggacatgggcagaattaaccagatttaataccattttgctcacttgatattaaaaaatgtgtgcgtaaatgtatatatatataagtaattttttacattcttgaccatgtattacttcccatttcaggttataaccagtaggaatttgctagttcactcyggtaattatctgttctcctagctgcaaacastgmtaagtagccyttaaatgcagctgagatgattgttaaaagaacatttaaaatccttccattaaaaacaagtaaccaaatttggtaaagttctttctgaccatctgggctcttgcaaaagttgagaaatctagggcactatcaggaatgtcaccaatagctagttattcgagagtaatttcatgtgtgaggaatgcgttggaagactattttaagtccacatatttcargtrggtttwatttattkgaatctgggaacatagggattgaaaaattctcaaggtaagcttttggttgtgaagtcatttataaccaaatcagcagtgatcagtgaaagctggagattataattgaattggggagtgttgaggctcttatagcgttaactatttgaagttgttatagaaaccgtatagtaaaatatgacgtacacacatatatatgtgtacgacgtaggtagtaggatgttagaatggttgtattgtctattgtctcagtttcacagagccacccataatacagcgaccaaaagacagctgcctcatatagaaagtcatgatcctggtccatggcttttgtatatatgagtccagaggagacaagagaagatgtctctttagagacaactgtggccatgtattgagtcatcattaccctcttgggagaaaaagtagagtgtactatcttgtaacccaaaaccccaataggaggcattaagaggactaatcagaaagctctgaattatttcttgcagttggaaaaccagaggcttgtgcctgcatcaagcctgggaagtttagagggcccatgcatttgagactcaccctgaaactctggaaggccaggagaagaggggctggccaactgcttgggtggtagggtaggaatgctcctgcttgcgaagtggccaatatttcccagtttttgtcaaggcatgagatgtgtgtgtttcctggggatcagttctggactgtgcaaaggagagggccaacgtggggttgtttttgatatacttcaatacagtaactgaaggagtcatggaaaagtagcatatgaagtccaaggcagatgcctagatgacctggggcttgggatgggggatcccyggccacccacctgggatytagtgagctgtttgagaaaagaacccaacaggaaacctctgcagaatccataaaagcttatcaaaagagaaagtgtcagccctaactatctgccaggcccagagacagccaagstagattataacagaactagcacaaggaggagcccttctgtctcttagtttcttcaaccttgagaaaggcagaatgctggctaataaggtggaggggccacagggtgatctggaggctttcagtctgaagcagggmcaagctgagaaggggaaagattccatacaaaagcaacatggttgtggagtttgttttctcacctgggactgtatgtgtaacctgaagttgttttwgaactgcccattacctgtgaacagcaaactcgtgggcctgctgtagtttttatccaagggcaaaggaagattattaccacctaatcaaatttagaggggcaaggagagtaaaatgttgtgttttatgcaatggatcatgcttgttcagcatactcgttacatgaagttatgtatttgtatgcttatttctaaacagacatgctctctacaaaactcctaggtacatacctatgtattcaacacatattaataaatgtatctatttagattaatagaaccatttytttcagtaaaataatttgctttaggaaccaacattaatcaatttcaaattttcaatatttcacggtatcagtttttcaacatgcttgtattactgttttctcccattttaatattagagataatgasaaaacaaaaatattgtggggcaaacacctatgaagaaaaacaggatatatagaatagattcagtagcaggaaagcatgttaaattttctctttttcagtcttgtagtacctgtctattctagaacatctttcctccagtgcagcatttcctaaaatatggccttcaggatagtaasaggaaktattygaaatgacggtttcctagttasatatgtgagggaaacacatttccctttgccaagctctaccagccatgggatttctcaaactctctgttagtgtatgttgtaaatttcacagtggcattgcccaaacatatttggtaacagcacactgttttgatgggggctgtgttttgaaaacatgcctttaagatccctggtggactgttcaagtctcatagttaccctcacaaatacagaacatagattccagatcccaaaaatatcagatgattctaatgatgataagttatttctggaggcaaggaaatatattctgccaattcgttcctttctggtttggaggaaactacttaatgcagatactactacccttgatcatagaargagtataaataattgagtatactgcaaccctaaggtgatcattcttgactttgtggctggagaaagtyttgacatatctaaaacctatttagaagaccatctgcgtacagcatctacatgagcctaagaatgcaagtaacttggttttattaaacacttttgcatctgtgaatctagatgtaggatttagcttggtacagttaagatcactctgcctcgtagtatagtctgaagtcgggtaatatgccttaagatttgttctttttgcttagtcttgctttgtctatgcaggttcttttttggttccatatgaattttaggattgttttttctagttctgtgaagaatgatgatggtattttgatgggaattgcatggaatctgtaggttgctcttggaaatatggtcattttcacaatattgattctacccatctatgagcataggatgtgtttccagtaatttaatgctgtggggggtgggggaaagaaaacaaaatcatgttgtacattgaaagggaaaaacgtagatggtctctasagtggaaaactgttgtcactttatcttgcagtgaagactcattcattcgacaatagttgggtgcctactatgagccagattatatgtgaggccctggaaatgcaatgktactcaaagatacacatagtccttgccacgtggaactaccagttcagctggggagatagacaatatcaaacagccataccaaaaactgtgaaagtgctttcatgaaggaaaagttccagatgctatgacagtatgtcttaggggctttgacctcattagtgaacatgggaaagtttcctctggaaagtgacaattgagctaagataggaataggagttaacaagtgaaggaagggaggaaagcacattaagggcagagaaagcagcaggtacaaaacccagggccagaggaagcagggttggcatcaccaaccaagagaggaccacatacccctggagcgggggaggtggggggaagaggatactcctctcccatctgatcttgagattgtttccacctgtgatgactttgctctgaactcttctctttcgcagagtgatggttaaagcccaatggaaaatgcaaccacatttctccccttttttgtgcatttactttggaaatttctaatatagaagaaaagatttttgttttacaaacttgagaatgagcatgagtagctccttaccgtttcccccatggggagggtgtgtgtgtgtgggtaaagaatctgttatcattcattgtctttgggcctcttgtgaaatgcttagaaatactcagttccatttaaattaaggatctgcaaccctgggtctgactgaattagcttttgccaaatggccatcatttctaactaactgtggctttgaagatcttatgtattccagtgtggtgtaaattaccctttgggggcatgtgctggtaattctccatcccccgccttcctagcctattaggcgaccttgtctgccctgcttgttgacccaggaggttgactgtgtcacctgggcttccatgtctctgtcttccagtttgggcttggtcaatgggaggtactggaaagagaccaggcaatgggcagagagagagagatgggggatgtttactcccatggaagtctttctcatcatgtttttcagggtctgtgtcccttcaargctgtagcagtgatgatagtcgtcccactccccaccccctacccctaacccacccacctttacctcaccaggctctgataacatgttctctttctttgcttttttaggcccaggatactaaaggcattctgctgtagctagtaccaggggcttcaaatccttaccttgtaacccaacctccacctctgaaaatagtttatttctcttcaaagttgcagaggagtatgacatctgtgtcctgtcaggattctgactgatgccatcagaatctggtttttggctgcccattttattctctcccttccaaaacctgaataggcttcagatggagataactagggaccagaagaaggatggtgaaattcccaggattatacaagctcactttcctctctttgggcccaaagtagatcagtctctggagaaacgaaggacactgtttgtcatcatatatctgcctggctgtcattcaggacctaattggactctcgtaaatttcattcttttcatgcttgtcatgtttctgggcccctgagaaaattcttgccatgcaaattctgaagcaagacattttgacatagccattttgatgctgtgggtattttaatcttcaaagtgcaaagaatagaatataggtcataggcacaatagacatcttcacaccctcctgggccctctgcctcatccttgtacctcatcttcacttgaattgtatttttactttgtaaaaatattcttacatatatgcaaaactcaagagaatagtatggattctcatgcatctgtcatccaacttccatgatgatcaacctatacttgagcacatgtattttttccttttcttttcttttttttgagacagagtttcactcctgttgcccaggccggagtgcaatggcataatcttggcttactacaacctccacctcccagtttcaagcaattctcctgcctcagcctcccaagtagctgggattacaggtacccaccaccatacctggctaaattttgtatttttggtaaagacagggtttcaccatgttggtcaggctggtcttgaactcctgacctcaggtgatcctcctgcctcagccacccaaagtgctgggattacaggcatgagccaccacacctggcctgtgtgtttcttttttgctgatgtttaaagcaaatcctactcaattatttcacctataaatactttagtatgtttatttagcagataaggactttaaatgtaatcacagtagcatgcaataaaatgagcaagcattctttaatatatgataaatagtccatgtttgattttcattcatttcctcacatttttttcagttgagtttttaaaatcataagccatatgacatccatgcattgcctttggttgctttgtctcttggattttctttaatttctctcaatcctccacctttaaattttcttattgaagtatgacaaaaacagcaaaagtgcacacattttaagtgtttagctcaataaatatwttcaaaataaacatcccatgtaactatttctcaaagatgtagaaaataccactcactagcactagtacccagaaatttcctgttcactaagtgaacacctgctctgcaagatatacaccattttaataatcatggattgattttatctgtttttaaacttcaatagaataatacagcaacttatctttttgatctgtctttggggaatttcaactgtcttttaggaaaaaaaaagcttattggggtatagtgtgtatrtaataaactgtgcccatgtaaaattcattcattgagctttaaaagagggatacacccatgagtccaccaaaatcaaggtgcagaacatttctgccacccctaaaactttccttgtgccacactgtggacatttccttctgtcactcccagctctcaggcaaccgttgattttattttctgtcactagcggtgattttgcattttctaggatttttaatgaattaacycataatatgaactcccttgtgtctcgcttcctttagtgaacataatgacttggagaatagtggttgcatgtgttaatgttcctttttattgcagaatagtattccattgtatggttattcracattttgtgtatccattcacttggttcacataggggttgtttacaagtttggattattrtgaatgaagctgcttatgtatagatatttgtgtggacatgtattcatttctcttgattaaattgttagagtggtacttaccccaatttacctagtactctttcttccatcctacattctatgctttcatctgggaaatttttaatctgcccaaataaccccctttagttccttttagtgtttcctttaatgtggattttatcttcttgcagagatatgttaacattctggcaggtggatacagtataagcaagttatattgatttaatccagaaatgatatttttcaaattctgtggtctatttctagtttgtcctaacaattcaagccttttgagtttctcaaatgaaattttggggcatttacgatggccctttctccttagtgtcttctaaattgcaattttgtctccccaacccttttagactgacaaaatggctccttygtttttggtcttttagcattgatttttgcttagttwattggtctcttcatatrtttgcagtttaggaatttgcaaatatctcaaggggaaattacgttaggagtattgggatcacttttctttggttcaccgttctcacaaatcttagtccctcaagtcctagctgctgcttctatagcccttaacttccaaacttctctctctagctcagaaactgcatcaagctctagctgctgctttctacttggtttattccctcacgatgcaaattcgcaaatgcccttaggacacaaagttgctttaactatagagctcacctcagtgggctttctttscctrcatcatctaggatgcttgaatcttgcatgccttggttgtgctctgatgcttttgaacagctttttttttttttttaatttatgcatctatcacaattactttctgcaggaggattagtctgatgtatgaagttattcattcatagccagaagcataacttttccagtcatgttttaaggaaagccctccattcccacccccaacacaccattttttaaaatgacatttgtttgttgagaagatatgccattcacaccctctttgaatttttcacacatttgatttctgatttgcatttttgtagtcattcttaaacacgtttcttctgtttctggtaaatatttggttatatatcataggatgttaatatatctccctatgatagtaacattaatatatcatagggagcatcacaccatgagccataaaatgaaaagattcctgaactttgctccacagtggaatcacctaaaacatctcaaattaaaattactgatactcttaccccagacattgtgatttgattgatctggtacacgacctgaacatyaasatttttaagagttccccaagtgatyctaatgtgcttcaaagtatgggaaccactgatgtaatgtactattatcccacatttagttaagttaggattgatcctarattcacatgttgtcagtgtgatgccttaaatatcaagtttccaattaagctttaaggcaaaggttttgcagctatgaatggtggttktctagacccattatttcattaagagctgtgaaatggtgattttctaaatctgtcattcctcctgcttttattaactgtgattcctctatgaggaaaaacgttccctccatgtcgtgttgttactttgaaaggttgtccatacaggaaaggcagggtaagtgtttaatttcccttagtttctttttgttaatattttctaaatcataagttggtgtcctggcaacttctaagggtgaccattgatttttactcttaagaaatgtttgaatgtttgtgtatttgatctatttcattctaccactttcattgtttttattgaagttgatttgtcttggccagtgggagcccctttcaagttagctccaagtccttttgacattactctagtaggttttgatagctttccacaacaaaatttgccaattcatcatgtctatttcctggagcagatctggaatcagtcatttctttaagaatccctggtccctttccgtgaaaagaaatgcttaaaagtccaaaatagaggcactaagtacaaccttatccttatctctcagcctattcatttctcccaatttacttgacaagactaatcataataataacmtaattcaattttttaccacatactgtatatatgttttaggatacttctctgcacttcagtgttcacatctatgaaatgggaatgataattgaaataatctaagcataatgcttgtcccattggctttacaatagacagccaataggaataatgatggtgacaatagtaattatgtggcaataatggtrgtagtgatggtagcagttcattttttcaacaaattattatgtatctaatgtaagcactggacataggcagtagtagtgatggtcatagtagttattttttaaataaatatacccttcctatatgtgaggtaccatattgagtactagagatggaatggtaaacgagacaggcatagcccttatctttaaggggagaaatgaaagacaaactggcaaatataaattatttttgatcaaaaagcatttacttaggtaattctctaacttctactaaaattccaagaagtttcataccaaaatcaaaatgactgcttcaaagtggtgctatcaaagtggccataatgaaatgtctcctacccaagtgtcctatgcattttgctgagtcttttttwttctctaagcacctttcccttgagaactagttttaatgaaggggattcttttgcagtgactcagagggttgaaactggascttctcttctctctctatccctgstgctgccaggattcccagacagcagctgtttcccaaggagatccacctgtcttggaaatggaaggaagccccaccagcccccaccatgacttggcctcagaggaggagaaaggcaccatcaaagcaagggtttctatagaacccagagtcaggaagccacttggctttctctgttactttagagtgaaaatgaggtcacaggatgtccctttctgtgaatgattgaataaaagaccaagagaaaaccttctccgtgtccaacagctaaaagtatcctcatgctgtgaaggactcacttttttggctttttatgtagtagccaaaagacagtctcagcaggataggagcacaggacgctggagaggtgagagcggttattttcctcctctcacttctggtgatgcctgcttacttcatagcgggggaaagcctcttaattggaaaaagaataacacaaaattttcagcattttgccactcttgatcttgcgttattttctcttactacataggaatttatcaggattcttcctcctcttgatcattgtgtccatccataggaatttatccagctcccttttgtggaaagtgaactgttttttaactgtaggacatgcccaagtctggtaaycttgaggatcttgttgtctagaggatgaaggtaaaattcattcattctggccaggcgtgatggctcatgcctgtaatcccagcactttgggaggccaaggcgggtggatcatgaggtcaagagatcgagaccatcctgaccaacatggtgaaaccccatctctactaaaaatataaaaattagctaggcgtggtggtgcatgcctgtagttccagctactctggaggctgaagcaggagactcacttgaacctgagaggtggaggttgcagtgagccgagattgagatggcgccactgcactccagtctgggcgagagagcaagactctgtctcaaaaaaaaaaaatcattgtacaaagcttaattgattctgcacaggattcttgggcctgggttaaagtcatgaatccagtagaaaatgctcctattctcctgagcaggggttgacaaactaagaccaaattcagctgtggcctgtgtgtatgaccctttgagctaataatagatttatgtatttaaagtattcttttttaaaaatgcaagagactatatatatatgtggctcacaaaggcaaaaatacttgctgtctgcccgtttaagggaaaagtttgccaaccctgctcttggacatttatcccgaggctgctttttctattatataaaggtcatgagtatgggctcagagttccaattctgactcggccacttactatgcagtcttaggcaagtggcttcactcctctgagcttttaatctgtcaaaagaaaatactaagagtcagccaggcagcaaatatttatggagtatctacaacttaccagggatttctaggcatgggacatggagtaagataataaacatacacacaaatagatgacttaaattcctataaaactatgaagacaaatggagccaggtagtagaggtggggaaagggtagtgtggttggggggtttatgtgcaagaaaacggcttatgaaggaggggagtggtcaactggccaaatgccactaagtggttcagtaaagggaggccagaaattggccacgggctttggcaagatgyggtttacgagggagatgctatgagtggcctttggcctttatgcattcataataaaaagaaaaatgtggtgattctggctttttaaagaacctggagtaatctttcaaaggaaacaaataggctgaatttaaaaaaacttctgcaagtaattttatatttctgactctaacaattgtattatagataataaggaacaaagaaattaatgactgcctgctgtccttttagtttgtgtccctaagatctgctgcagtrttccaaaattatcctgctcttagggtgctaattggaaacatttttcaattgaaatcttttataggctgggcgcagtggggcatgcagtagctctagctactcaggaggctgaggtgcgaggattgcttgagcccaggtgtttgaggctgttgtgggttgaggatagtacctgtgaatagccactgcactccagcctgggaaatagagatggcgtctcactctaaaataaggtattttccacatgggaatgcaaaagaaatcatgttaaaacaaatccctgtgacttttaaatgcatgtctaagccaatatttgcaaacagcatttagggtgaattagcatggaacacttcgggtttctaacacagagaggtattctcccaaacttcttctcctctttctcatttatcacaaagattttttcatcttggtgctcgtctgcagcatcagaggaaactctggccacacagcactgcattactggagagaaaatgctggtgccgttaccccaggatagaaaagaagaaaaaaggccaacgtctattgattgygatttctcaagcagagtgatgcctttaacactctgtaatgaaagtttttatatgtgagagggattaccaacactgggctgttactgtcctttgatgtgcctcagaaatattacagaagttattaaagaatcaattgtgggaagccaactgccctactcgggcagcttcttgctttgctcctggctaatttatgtrgcggtgaattttctttcttcgtctcctagttcagtttgttagcttttgaaaagattttttttttkttgttttagagtggtgtgagagtagattggcaacccgtttaagttcaggatagcaaatgagttgagactaacagcatctatctaggcacatgtgaaacatgtttgtgtccccagaactcactgaagttggctttcacccattttacagatgaggaaagtgaagctcagaggagtcaggacatggccaaggtcactgtgccaattggatgtccacccacaaacgtgaaacaggctcatgttactcaaagtccagtgatttctacttacagtacagcagctctgtgccagagagaaggttaaaattgtttaaaacctggaaactaatgaaacatgaagaaatcatatgctatgagcctgtgcgttccccagatttccactgaactggaaattgttgggacaccaccgtgggtctgaaacctttccctggcagctggrcttggtgtccgcagaggcgctctgtggcttgtggttaaatcgygcagatggaaaccaggcagtgcttgggtacgggctcatgctttctcctcgcttgcccaaattaagctgcctaactgtgttcctggggaggctgaaggtttgttgagggtcagctagcatttcctaacagctctctagaatgcgagtagcatacagtttcctttcccaagtgatgacagacacagtcatcgcggaatagcttgaaagatttttctaaatttggactgcttttatttggctccttatattaaatccaaaggacctcacataacaccatcttttgtacaactgttttgatccatgattttatagcttctcaagtcagaaatgttccaagtatgtacagattaccgctttatacttaaatataataatttgttgtatttctaatacttattgtgtgtttactgtgggggcaggtattgtactaacagctttacacatattatttgatttagcttttgcagtagttgtggagctttcattattcctcttatacaggtaggaaatctgggggttaagtcacttgctcaatatcacacagctagttcatcgtgcaatcgggatgtggaatcaggtggtttgactcatgtctcatattcctaactattgcctccctagattaataaagtctttgaggatattttgggcacatttctttttattaaattgctttgaaggttatttatwtcttacagattttgtttaggcttgtggcaatctacagttgtattttgcatagaaggaaactaacaccccaagaagtaaaatgtccacagcatggttcttcttacactctcccatccttgccccttttactctgttctcttttgctcacaagatacctacctctgaaggagtttagtgtcaggtttcaagattctgcattattgataacttgcttagtgtccaaaggctggagaagctatgttgcattgtctcctctgggtctagaaataacctctgttgtattgtctaagaaggtagtgagggaaagaaatccattctcaaaagagaactttagttttttttaaccctttcctcggtgacaatgaattttagaaaatttatttacattaaggtttgttgattaattgagaataagataaagatactaagaagtatgtccttcccatgatttttggaattagggtcaaattatggcgttagcttgttctagaaagtttatctccgaggtattcttttggccacattttcatccgattagttttgtgagccagacctggaaatcaggactaaattatattctgtgcctttgtcacctctttacgtccctgcggaaactgtcatctgccagcatttggagaagacgcgctctcctacaacacctcttctgtattcaagtcatctttactacaraaacaaaagacatggagccccttggtaacgggccatgtcaacttggagctaagatagttgttcggaagagaagtacaggtgtagaaacacagcatgtgctaaaagtagtttctgtggaaaacctgatccttctattccctgtggttactgagtgagtagaactcctggcagaaatcagagaaatcgttctcatacatcatttactctttcaccactaaccactcttagaggaaccaatcatttaagaattagtcagcccctgaagatgtctgtggctgtcttcatgattttcccccatttttgaaacttagtagttgcaattaaaaaaaaacaaaaaacaaaaaaaaaacacttctttcccaaattctccccagccaagagcacattctagttgaatctagagactggcacaaaaataatttcaattttcagagtcctacccgtggtgtttcttgcgtccatctctaaatcccagtagaagatgctggtagtctgcccagttctgtgtagctgtgtggtacaaacaacagctaactctttttttcatgtttcatctcagaagaaactgggttttctgtgttacccaaagtgatttattgttttccatgcaaatgagagtcggattttaaaatagcattaagatggttctagaggaaaggcacggtgcccacgtaagtcattatctggggatgccgtgcgacacacgcacatggtagcatatggtggcggtggatggactgaggcccagagagacaatttgatggatttctttgagactctgaattagacagtgcctccggagatgaaagaaggctatttttcataaagttatctcccctccccctgccaacttcccmtcttctctaagtgttaatttttttcmtcttgttmtaggggatgggcccctggattaggttgatgacagattaatgaatggataggtccagcaagcacaggcattgttgccatctccctccgcatttctgcatggatcccctagatgtaaatcagaataatagttagtgaaacaatgctcaggtgctggaargacaggctcttgtttttaggctctctggaaaattttccctttatttgattttggtggtttcagtcatatggtctaatacagtttcatacaaatgtaatctggcttccccagcctagtacaacccaaatcaaaatgatattatacctcttcacagctgtaaatccttcctcaaattaaagctctgaaacctaatctgctagaagtctacagaggaggaggggcgcctcaagctccccaccaagaatagcattaagcatctaatgacaacttgacagagacttttatctgttgtcccctgtgaaataaaatcttcaaagttatctgcctcytctttgaaacttagcacaggctgtacttggccaggtgtctcaaagctgataccaagagggcaaagattgagagtgttttttactcagttatttctgtgtttttttttkttttttttttttaatgacctgggaagaagtgagtaaatttgacatgtggctattttccaaaaaaggttaaagaatcctaacagggactcaggtaagacattgatttaattgaattcatcaattaaccagtgatttaattactctgtataaaccagagggacgtcaagataggacaaggagtgggtcagtcttgggtgagaggaaggattagaaagctggagaactagatgagctagatttcctggcaaagttcaactgtaagtgttgagtggatgggcaggggcctggcagagtctcagggatggcgtaaggctcacatagtaggcagacactgctaagacaaatgctgggttaagtgtctcttgcatctagaacacaattagttcccagagaggcttgtgryggtggtacagtgactccttttttgtgttactattccaggaattttccagagcttctagacatggtccccttaatataggattttgattgctttggaaagagtgggttcttgcaactctaaacaagaggacaaacatgtatcctttgtgatcaacgagagcattgcttaggcattttagtctccctgggggaatagggtagaggctgattattcaaaatcatttgccttctgtccagtagtgtcttcttttggtgtcgacttcctcacactggttgtcatttataaaactgatggaatcacactagttgtgtcacatcagttaatgataccagagtacacactttaggtttctgagataacttcgaaaatgaagccagacctcctggctagaagaatcttggaatactttattgatagagtcctttaggacataggagtcaggtagggttcctgtttgaaccagtctctgggaggatactttcagaaagataacataagacaaatagccctcccatacgctttgatccccagggcagccagtgtaacaaaggaacaggagcaaggtcctgacactgtcattcaaaaaataccttttgrgagcagctatcaagtgtcaggctagccagacactgttttaggctctgagaatactagagtgaataaaatagtttgtatccctgctcttaygattctaggattgtcatctttaaatgggcactgtgtttcaaagactgcaagtagcctacattaacttgggacttcttaatagaggcagtctacctagatacattaaagcaatcaagtggggacaacagaacaaaagaaaaacaggaagggcattattctagaatctggccagtgacggctactcagctttaagggacaagaacctatcagagaaagatagagttggaaaatcattttactttccttgagttgactttaattctgctttaatactagacayggctttcatcatgctaaactaggctttcctgcagtaataagcaacctctaagtctcagaggcttaaagagaagtttcttggagttttatttccagaatggcagaataaggtgttccatggaccatttcccagaaaacatccataactgatgaaaaatataaagaaactcatttaaagtctctggaaattattgtaatggaatatgacaaatcaaaagcacttatgtgagcaaatctgaagaatctccctaagaacatgagagtctgtagcatgtcagacacagcctgctatctatccctttcatgtagctctgtgagatggagcctccactctgggcagatgtggccaaagagatggtgctgcctttcccctcagcttccagtcaagggatatggtatctcactgaggaacaggtcactagaatttctcattccctctgccctaaactgcagaggctaagttcttggtgagagtggcggaaagtttaggaattaccttcttccacctacccccaactaattaggtggatgttctaccccgggtatgggaggctgagaatattgaggccccagtcccccttgcctcagcttactcataggcagrttctatgctgagagaggcaagctgagagaggcaagctaagaaagccagaggctgccacccccaacaagtcccctactcagaaagtataggtgttactctgcctgccagctctggagctccaggctcagattttgctaggggtagaagcagtccataagaactctgaagctcataggaattgatttcatttgaaacagtggggggaatgtcaagcctaactaaggtcattgtccaaagcaatagacattgtggtgataagcmattaaaaggaggctggtagctctataaaatctacaagctaacccatcgatwacctagatgatcagagagaatcaaagaaaggtaaaggtaagagagccctcctggagtaacgaaaaattggcctgaagatctaactcccaaaggcccttgaatttaattgggtcagactgtggagaaatttatgcctctagggtatttttcaaaacaatagaatgattatccagtaattagtgaagcataacagctgggtgtgaggccaattgaggcagacaacagaaatatcagagaaagagataaaaccttcaatattcattgttctcaagtgtacatggaacattttccaaatataccacatgctaagccataaaagcctcaatatattcaaatgattgaaatcatataaagtatattctctagctacaataaggtgaaattagaaatctaacatatttttggaaacttgcaaatacacagaacttaaacaacacactcctaaatatccaatgagtcaatttaaaaaatcacaatgaaaatgagaaacaattttatgtcattgatgaaaatgaagatgtaacataacagctgatagaatgcaactaaaacagggctttgagggaaacatatagcttaagtacctgtatttttaaaaratctcaaatcagtaacctatgtttcaccttaataaactataaaatgagtaaaccacacaaagcagaagaaaataataaaggttggaacagaaattaatgaaatagagaatagaaaaatagaatcaatgtaaccagarttggttcaaaagatgaacaaaccagagaaaactttacctagactgactaagcaggaaagaaagaagactcaaattattaaaatcaggaataaaaagtgggacctggccaggcrcagtggctcacgcctataattccagccctttgggaggctgaggtgggcggatcacgtggtcaggagtatgtgactagcctggccaatatggtgacacccygtctctactaaaaatacgaaaattagcmgggtgtggtggcacatgcctgtagtcccagctactcgggaagctgaggcagaagaattgcttgaacctgggaggcagaggtttcagtgagcctagatcccgccactgcactcsagcctgtcactgcactccagcctgggtggcagagcgagactccatctcaaaaattaaaaaaggggaccttactactcaccttgcagaaagaaaaaggattacaagggaaaacaatgaataaatgtatgactatgaattggataacttggatgaaatgaacaaattcctaaacagatacaaacaaaactgattctacaaatataaagcctgaataacccatcaaaagtaaaaagactgaatatatattttttataataaaaaactacccacaaataaaagtccaagttcagatgacttcactggccaattctaccaaacatttaaaaaattaatatcagtttttcagaaactcttccaaaaattatcactacrttctatgaggccaatagcatcctgttaaccaaaacagacagacatcacaatgcaaggaaactacagaccaatatcttatcaatacagatgtaaaaatcctcagtggaagacaagcaaactggatccagcaacatattttgtaccatggccatgtggaatttatcccagaaatgcaagatcattttaacatatgaaaactaataaatgtaatatagcatatcaatagaataaaggataaaagcaacatgattatatcaatagacatagaaaaaatatttgaaaaacatttaacaccctttcatgataaaaacactcaaggaaatagaatagtatgaaactttctcaacctgataaaaagcattattaaaaattcacagctcatatcatacttaacagtaaaaaaaaaaaaaaaaaaragtgttttcccctaagataaggaagaaggcacagatatcccctcttgccatttccattcaacattgtctaacagttctaaccagggaaattaggcaagaaaaagaaactgcattcatatttgaaaagaagaaaaactttattataaatggcataatcttatatatagaagatcttaaatccactaaaaaacctatcagaaataaacaagttgagcaagtttttaggatacaagaacaatatacacaaactcattctctctattcacttgtgatagacaatcagaaaatgaaactgagaaaattccatttatgagggcatcaaaaagaataaatacttgggaataaattaaaagcaacaaaaaatataaactctgaatttatgtatatttgaaataagttgaagaatatctaaatacaaggcaagamtttttatgtttggggattggaagagttattgttaaaagtgccaaaaattgttgagtgccataaagattcaatgcaactcctatcaaaatctcagcagatattgttgtaaaacttgacaggataatcctaaaatcatacagaaattcaagggatcctgagaatagctgaaacagtcttgaaaaaaagtgcgaacttggaggatttcctggtttcggaactcatgacaactctacagtgatcaagagagtgtagtgctgacataacaataaagatcaatggcatagaactgagattccagaaataaactcacatttactatcaactgattttcaaaagtgctgccaagacaattcatggtaaaaaccttttaaacaaatgattctggggcaactaggtctccacatgcaaaagaatgaatttggatccttacctgaccccatatacaaagattatctcaaaatgaatcttggcctcaaatrtaaaagctaaaactataaaactcttagaaggaaacataagcataacaaatggccttggattaggcaaaatattttagatatgatgtcttaacaacatatggaaaaagacaacacaagcaacaaatggaaaaagacacaagcattaaaaacttttgtgtttccatggataacatccagaagctgaaaagaaactccacagaatgggataaaatacttacatatcatatatctgataagagacttgtatctagaatatataaatatttgtataaacccaatttaaaaaatggataaaargtctgaatagatatttatccaaagaagatatacagatgaccaataagcccataaaaagatactcagcatcactagtcatcaagaaaatacaaatcaaaaccatagtgagataccacatcacctcataggatggctataattgaaaagaagacatagaggaacttgaacatacattgctggtgagaatgtaacrtggtatagccactttggaaaacagtctatcatttccccaaaaggttgaaaaacgaattgccatatgattcagcaattccacctgtagatatatacccaagagaaatgaaaacatatgtccactcaaaagcttgtacgtgaatgttcatagcaacattaaayttgctaaaaactagaaacaaggccaggcgtggtcgttcatgcctgtaatcccaacattttgggaggctgaggcgagtggatcacttgagctcagaagttcaagaccagtctgggcaacatggtgaaacctcacctctacaaaaaatacaaaaatttgccaggcatggtggcatgtgcctgtagtcccagatacttgggaggctgaagtgggaggattgcttgagcctgagaggcggagattgcagtgagctgagattgtgccattgtactccagcctgagcaacagggcaagactgtctcaaaaacaaacaaacaaacaaacaaaaaaaaaaactagaaacaagccaaatatcttatcaatttctgaatggacaaacatggcatatcctgtcaattcaatatcatcttgtaaaaaaaaggaatgaagtactgatacatgttacaacatggatgaaccttataaacattacagtaagtgaaagaagccagtcagaaaagaccacatatggaataatggacagccagarggtcaggcctaccacagacacatttaacattattaacattgctaagtaatttcagtaatattatttattccaagtttttattctgcctttatcyagtttttcttcttggtagactccattcccacccttcttgaatattttacttttggaatcattgtcaaagcrgtcctctctcttcattcctattctcattcatgttcctatatttataaaactataaaacttgctcagattcctgtattttgctgggactctccatcagcttcctaacttgggctggtcttctgtccaattccattcaaatccacaccagctgtagggatttttctaaacttcatatccaacctgtcctctgccaaatcttgccaaatatgtgttcatcattgtcaagttgaagcccaagctgctcagcatggctgacttaaaaagtaagctaagctttcctgctgtctcttaccactccttgcttctcattttgcattctggcaccactgaactgcatggacttctctgcatacgtcctactggcttttgccttcacaccactggctctaccatttcttctctctgggatgctctcctcattaacttttggcctccttactccacttaggcatggattaaacagcccttttgaatgtgctctgagtcagtttttctgtttttctctgtattactataacattgtacttagcatgttctgccataattatctgttcatgtattgtagaatttttcaaaagcaaacactatgttttactcgttgtatagyacagtgcctgatgcataggagatcctgaagtggggggtatggagggagacattgaccttgagagaagccttctgttccctccaactggcttcttcaggcaagtttaaagaccaaatcgggttgggcaaatagatggttaaccrgtgtgttcctgaagacacgccgaaacgaggacttccttgctcttcccatagttttactaccatgacagtccatttctaactgcaatttaatttgtatcttaccaatatgacatgctagtgctgttccttctgctttaactgagcctatgtatcacccagtgcctctcaagcaattgttttttataagtcataaaggctcttgacttaaactttggtatgtgcgagttgagtgatacaaacacacagtatttcacttgaggtcagaacacagcccagcacagatttaaaaagaaaaaaatgaacatgttttacagctaaaatgatgggatataaatccttgtcctatcatttattagctctgggactgtggctagattacttgatttctataaagctccaatatctcatctgtaaagtgggactattggcttacataagtatcatgttaaattgagatggcatgtcgaatttagagcatgccatgtagcacagttctttcttgagctgcaagatcttgtgcttgcagtggaaaataaagtgatggcatattggacaggggaggttacactttggtgacaaatagatcagccacgcaattgcattaaaaaagttatttcttgctcatgtaacagactagtgattacttgttacgtatctactatgtgtgccaggtcccgcactaggcactgtaggtatggtcttgaacaagacaggcaaaaatctcacagtgcttctaaagatgggcttcgtgggagaaaaggctgattatgtttgcacccactgcaagttaaggtgtacgactrtcaacagcagcatcttgaagtcatgaatgtgtgtaccgtctgaattatctgaatgttggatccctgcctggttgggtgcaggagcctgggagaagagatgcttcttttgagcacggagctcagaaatgtggcaaaggctgaaactactgatgaaggacaaggtcttggaataatgtattgtttcaaaccttgatgcacaaattctctacttcatgagcgattctagcgtaaagcaggcatgctttctctagwaatgcctccctccaaccaaaaaaccccaaagtgaaaaagaagaaaaactgagaacaccagaggccttaaattcttatgaagtatgagttttaatgcatgcatccaatcagcccaggctgaagtgttgacattggatttatttgcatgacttaatagcttatttcacaacccactcaaaagctccttttccctttgagttctgattgttttgttatagtccctgtggatacaattcacatcagcactgggtttactatatattccccctttgcctttctctctcttaagtgtgttagtccttcccacctaatgacaaaagcagtttcctaagcaactgagcaccagaatgtgttaaaaaaaaaaatctagatttgtacstttcaaaaaatccacataaagaactgtgatttgctttaaggaaggggcaaatggaaacatggttttaattgagatatggatataatcctgttccagttggtcacagatgatcttttcggccaatttgggactgatgaggaaaagaccacttgggtgcttgttacctgtagaaagtacttttaggggcaccrtgagacatggaggcttgcccgggttttcaatcttgactccatcaccaatcawtgagtcatctcaagcaagttatttaagctccctgactcccagctttcttgcctctaagatggggataacaattcctatgtttgtgtagctaagagagctcaaatccttaaraaaaatgcagagggttaattctccctacacagtggacacctcattggcatactagctgtgtggatgaaaggttgattctctctagaatttaactgtcagaccatgtaattgtatttttttttttttttggagagtgtctcactctgtcacccaggctggagtccagtggcatgatcatagctccctgtacccttaatctcctgtgctccagcgatcttccctcctcagcctcccagttgtagctatattttaatggcctgattccttttcatcttgacttaattgccaaccactcaagtatttctagagcccatactatgtgactattgctgtacaatgctctggaaagccaaaagtgtgtttgtatagtgaccaccttgcacatgtattttctggagtcttttttttttcacataatgctcagtgcagtcactagtagttgctttaaggaactgtccaaatttcagaatgatatttataaaatgttccatttatgtttgaacactttttggaaataagtgtaatagtaagcatattaaaaattagactggggctgggcacggtagctagtggctgtaatcccagcactttgggaggctgaggcgggcagatcatgaggtcaggagttcgagaccagcctggccattgtaatgtaaaccctgtctctactaaaaatacaaaaaagtagctaggcgtagtcgtgggcacctgtaatcacaggtacttgggaggctgaggtaggmgaattgcttgaatccaggaggtggaggttgtggtgtgtccagatagtgccactgcactccagcctaggtgaccatgtgagactccatctcaaaaaaaaaaaaaaaaaaaaaatcaaaagtagactggaagcataaataccaaactgtgaggagcatttgccccaggaatgaaaggattggtgtgaaaacatcacttgggagttaaatgttttagtctggatacttctgagtggtttgacattttttataaggctatttatatattatttggttttaagaaatcaatacactatttcttttttaacaattttaggtttacagaaaaattgagcaacgagtgcagagtttgcctacgccccaccactcccccagtttcctttataattaacacttgcattagtgtggtatattttttacatttgatgagccaattttgatacactattattaaccaagtctgtaggttatgttatggttcagtctgcattgtacatcctatgggttttgacagctgttgaatgacatgcaaccmcygttatatcattcagaatagttttactgccctaaaaaatctcctatgttctatctagccatccctctttccctccccctcctctgagcccttgcaaaccattgatctttgtattctcttcatagttttttttttttttccaatgtatcccatcactggaatcacacagtatgcagcccttaaaatttggctccttttgcttcgcagtatgcctgtaaagtaactccatgtctttctgtggctcaacagctcatttctttttagtatggctgaataatggtctgcgtataccatgatttgtttattcattcacttactgaaggtcatctcaattacttccaggttttggcaattttgaataaagttactataaacatctgtgtgcaggtttttgtgtagaaataagttttcaactactttgggtaaataccaaggattataattgctggattgtatggtaagagtacgtttcattttgtaaaatattgcgggtcttctgaggttgctatatcattttgcattcccatccacagtgaatgtgagttctgttgccccacatcctcactagcacttggtgttgtcattgttttgaattttcacaattctaataggtacatagtggtatcattgttttaatttgcaatatcctaataatatatgttgagcttcttttcatatgcctgtattccatctgtatgtattttttggtgaggtgtctgttcaagtcttttgcccatttttaaattatttttcttaatgagttttaagactttaaaaaaaatattttggataacagttctttatcatacatgtttcttgcaaatattttctcctagcctttggcttgtctttctcagttgacagtgtcttatatyaaggagacgttttcaattttaatgaagtctagcttatcaatgatttctttcatggattgcacctttggtattatatataaaaagtcactttcatgctcaagatcagctgaactttcttgtacattattttctaggagttctatggttttacattttacatttaggtctgtgattcattttgagtcaatttttgtgaatagtgtgaggtctttgtctrgattcttttttttttttttttttttttttttgcatgtgggtatccatttgttctagatccatttgtggaaaagactatstgggctttctcttctgtttcactgatgtatttggtggcttttgccaataccacactgtttcaattactatagctttgttstaactcttgaagtcggatagtgtcagtgctcctactttgttcttctcatttaatattgtcttgcatattctgaatcttttgcttttccatgtacactttagaatcagtttgttaatatccacaaaaaataggttgctgggattttcattttctttgtatttattaggcaaaaatattcctttatttacattttattcacatttagttttttatgcgcacatttaaaggactttattrtaaacaacgacagtgattctasaacrgtagatagcttttttaaatgtaattactcttgtaagaggaaaaaatacatgatactaaaggattgtattttgtgaccacctataatgcaacaaatcatctacttagttgctatgttaatctttgctgctgtaacaaattatcagactcagtggcttcaaacaacacaaatttatcatcctgtggttctgtaggacagaagtatgatactgggcccactgggctgaaaaggtaccagccgtactgcattcctttttggggcctttaggggagattctgtttcattggcttttcagttttctttgtggccccctgcattctttggcttatggtcccttccttcttcaaagcctccttttcacctccttcaaagtggtcaagtctgtcttatacagcatcattctgacctcttttgcctccttcttccacttttaaggacccttagcattatattargtccactcagatgattcaaggtcatctcaaggcccttaacttaatcaaatttcaacttaatcacatttgcaaaatctttttgcataacatattcgcagcttcttcaaattaaaacgttgacatctytaggtgtggccatgattctgcctgccacagtagaacttgttttcaaagtaatcaggttttgccctcagcaaattaacgcaggaacggaaaaccaagcaccacatgttctcacttacaacagggagctgaataatgagcacacgtcaacacatggagggaacaacacacactggggcctgttggaggggtgctgctgggagggagagcataaggaagagtaactaatggatgctgggcttaatacctaggtgatgggatgatctgtgtagcaaatcaccatggcastaccatctctacagcagcacagcctgtatcaaataatggtatgttggagtaattcaaactggaaaataggtagctaggaggactgcacctgagcatatcaaccatgagtttccataaacctgtaaaacaaaatagccaaagaattattacatatatatatctgtggttaagaaatcatacccctcctttttgaaaggcccaaattcaaaatgaaaagataccactacattatatgactggctttcaaaaattccccagtgttctgcttaactttttaaatttactttgtatcttttttttttaactccagagtagaagagtgatgcttgatgtcctcaagttacagccagcatttactaattctttgatttgactttataaagtacttatgcttgaatccagaacccaaggatttttcagttatcacaaattactttcacagaaggctaatttattmttctatgagacaatccattagattggtgcaaaagtaactatggtttttgcccaaaaaccatagttacttttgcaccaagctaaaatattcttctcactaaactttttctctgccaaaagatcacatctggataactttttttccccacatctggataacttaaggcaagcttttgtacctcttcttcagtacctcagagagaaaacagcttctgtttgatatttgtgtagtttgttttggcatagtcattggaaaggtctaggattttggttcctggaccacatattaaaatagcaattccctactgttcaaattgaaacttgcctgtaaaaattcaatgttagtttttacctgcttggtaccctgaattaagatgaaagggttttaaaaaatcatctttcttacaaaatctgtgggatcattgtgacccaatgaaaaatatacttcctgcaaaactttaaccatctgtttattcagatcgagactattggaaaaggtacaagggacattggtcaacaatcaacaaaggcatttacaggtaaatccagctgagtagaggaactcatagaatccctaagtttaggttttcatgggacaaaagaaagcattcaggagaatggcccaaaatatttacagtatcaagatctgatatcataatccttcatagatcccattgttttgaaagacgttcaagagtgtgtgttatagcttttagttattttgatrtgatgctaacaatcacttctttgctagctcctttggaacgaagaaacatcttcaggtcctgctcattgggaacattctkttaaaaactccaggctgtcgtttctttgccatgtcagtatccacttccatagtaagttattcagtggttcctcattctccaaagctcattgtctgcatcgtttcacttcacaccaaaaagcctaagtgaaactgatttgaagagcatttctgctgaaaatcaggtcatccaacattttgaattaaagtgaaagttctcatataccagagatttcttggtgccataatagtcaggtagcccaaacctttcggaatgctgtgtgccgtagatggcttttactttggcttgggatttttaaaactgaggttgcattgaatstataggtcaagttgagaagaactgatatcttgacaatattgagatttcctgtctgcgtatgtggatagctttcctttttcttagatcttttgtatttctttcagcaaagttttatagttttccttatatagatctttcacgtttgatttatacctaagtatttaaatttttggcattaatgtaaatggtattgtgtttttaatttcaagtcccaattgttcattgctagcaataagaagacaattgactttgtatattaacttttgtcccacaagcttgctatgattgcttattagttctagaagtgtattacttgtataattaaaaaaattttwaaaaagaatcaaagagtatggaggagaaactttcagcacacctgtgcacatcataatcattaaaatgtgatgaaatatgttgacaccaggtgttgcttttgtgaatttcctgtagtggcttagaatcacttttgcttatattttcaaatgtgaagatttgtataataaattaaactgaacaaacaagaaaacatctggggtgagtttttgtaacaggtgttgtgtaaataggtcttgtggatatccaaacaggtgacactacctaaaatatacacacatgttggactcaacatgcacagaaacaaagcatgtggaatagaagaacctagacaatggtagtcccaagaattgtgacctaatgacaagtgatattactgacaagggtgttaataactcatagacagatcagagtttcgataaggaaagcagggacatctctcaatgtacagcaatgaggaagacttcatttgtgcacatttgtctgacttccaaagaacagtttctttatctctttttcttccacatctcactctattcttattggtaaacttcactcgaaccatccagggaagagtattctgggaaatgtagttcttgccatcagctttgcaatgcagagagcttagatggagccttatcttatgkaatcatattttatttgaataagacttctacaaaatgtctttttctcctactggattacaagtttcttaaaggttaagattgtttcttttatgtctgaatatatcttgcagcatctggcagagggtygtrcacatagtaggtattactcaaatatttgcttaataaattaatggatgatattacttaaagtactgttatgatcaatgtaagttaccrcataggtgaattggaccatcactttgctctgacgaatggctgtaactaaaatgaatagccaatttaaatttctgatttattaaggcctttttactgctgttcttttactgtaatactctggtggtttgcactggtcattaacttcagtctagagtattgagatgttagtgaagagttggtacattcagcccacggaatcacgtttcctacatgatcatagctggtatgtctgagagcagttgaatagcycctctaatgattgtagaacactagagtgaatgacaaattattggtgtctgatattatatgattggtaaacaaccattatgcactttgtttccatccctccaggaaagctagattatccccagatagtagattgctgtrtggaaatgccaatakttgctccctgttaatccaaggtaacaattcaagaacggtcatttgatataagaaatttttactgtaatcccagcactttgggaggccaaggcaggcagatcacgaggtcaagagatcaagaccattctggccaacatggtgaaaccctgtctctactaatagtacaaaaattagccgggcgtggttgtgggcgcctgtagtcccagctacccgggagactgaggcaggagaattgcttgaacctgggaggcggaggttgtagtgagccgagatcatgccactgcactccagtctggcgacagagcagggctccatctcaaaaaamaaaaaaaaaacaaaaaaaaaacaaaaaaaaaacaacttttgcaattttttacaaatcgatggctagttaagaatgactctaccaggcaccctgttacgatggggttcaccttcaggtccagtaggatgggtttaataaataatttctatgctgtcaatccactgtaatgtccaaatagaatacacattttttggcacccaaatagacttaggatttatttatttattaattttttttgaggtgttttgttcttgtccaggctggagtgcaatgacgtgatcgatctcgtctcactgcaacctctgcctcccgggttcaagcaattctcctgacttaggcttctgagtagttgggattagaggcatctgccaccatgcccagataatttgtgtatttttattagagatggagttttgccatgttggccaggctggtctcaaactcctgacctcaggtcatccatccacctccaaagtgctgggattgtaggtgtgagccaccacactgggctggtttaggttattcttaagtcttagaacatgaattctgtgcttccagagcgatattaagcaaaaccaagaaatatctactcatttctgtacatggtgctgccatttaactggcatacctcttttcttttgtgtcaggtgttacaaaggcatagttcatcactttggtttttactctcattctcagtgggcacctacttcctaatatccatcttcaggtctgtgtccagtcatggctgcttattaatgctgccactttgcttgccttgtatttctctttctccacccacccacaacctgtatcacttcatgtttcatgctgttctctgctctgttgattttctgccaagcttattttgacagtgttcctggactttgttgatcctgttgagctgatatactcttttcacctctgcttcctacttcattgatttcttctcttgggtacctgagcccttacctctgctgtgtagcatccaggagtctcaagccccactttgtccctccaagacacctgtgtgatatgttgcatggggagaagctactagtagccccttagcccttataagctcttaaaggccaaggagctagtgagcagggttgtctaaagcttagacaaaggagaatgagagaaaaagggaaatgtaggaatgactgaaaaagaaagaaatgkaagttaaagaaaaggaagtagggagagaaagatgaaggaatataaagggagttgaaaatggagcatataggaaggagggaagggctggagggaggagaaaagaaagatrtaagcagaaaagataatccaggctccatgcaaaaggtactcttcattcaggagctagggttttcatgttaacttgctaaaccctgagcttcactcactttgtatcattgtgcttttggactccactctttagatccttttgtctaccttactccccagcccatctctcactgcactgccacacttacctttcctgtgtatcaccaggccatccctccctgcctcagcagtggtggctctcttagtttctgtytcactccatgttcccagacaggtctcagggttgtactcattcagtgaagtgagacttggaaatgccacaaattttggccagaactcaacctgaagacccttctgacctgtaagtatccttgagagttcataaggaaggagggggcagaggaagaaaaagtcaagcattagagtgatgaaaaagaaacttctggagagtttcaagcttgaaatcccctactaatattcagaggcatgttcctgcaggcaagatccctttctattttatttaaataatgacactgtgacattcttggctgttaatcctctaaatggcagtcagggtaacagtcaaagtcataaagccagggattccaaataccttttatcattcatgccaaatatgattcgttgctggcagttacctgagatactgcattgagagccatttgaaggctgtgtatagacatagtgggaaggattctgttattgattaataatgtctgccacagcctgaggagatgggagtggtggtctgtgtggcatgcatttgtttatctagtctcaaagttcttataagagcattttctgttcttacagatagatcttttacagagttatctagccagagatgaatgatatcccttcttttaaaaattctgaaatttaactaacttttaccaccacttcaatttattttcttcagacttggaatgggtgacctggctataagaagggcacaaatgtttttaagcaatagatataccttttcccctaaattgaaaagtatccaataaccaaatatttatactctgctgctaaagccaggcatagatttcctgataatagtgtaaaagagtatttttgttttgctttttgttttaacaaggtcaagtatcttttgtggagtaatctagttggtactaattggagaaagtgagaagattcctttagcttctataatagatatatatttgctatgatgattcatatatgtatatccatagagtctcagagttgggaggcaatttagatggctctcaatttgtgtgatttgggaaatggagatcagagaatatgtgacttattgagagtttcacagttagctcatgactcatttttcttttgtataaagagttgacccttctctttgaccacttcactaaaggccatggagagcccccctaggatgccagtcagggaggtagccccaggtttgggtaagaagtcaggataggcaggtattatttctgggccagttcagtgattgagcatcattaggtagagcaggtgagggctaggtgaggaatgggacatcctgctgagagttttgaagctgagcagaacagtgacagtatcaggaccctctgcaggagcaaagtaagggggccctacatgactgcctagaacagagccaaaatgtcctcccagctgctctgtacacacacaggtagttttcactaacctccatatctgtgacatgtgggtagaacaagtttaaaggtttaggacaagtatgaaatcaaactactggatagttcctcctacgagggcatcttttgttagccatcttatcctgttattgggtyacagtagttcagtgacagaggtagtgatactcaggtagatttttggacctggtctagtatagagccgagcgttagaaagtccttgtcctacactacataaaaatcatcacagatggcaaaatactatgtaaacaacacgtattgctctcatgctgatgaggaacaatggtttctttccatacctttataaggaaaggcttggactaaggggccttcccttccttaacccgtttatgccagaggtttcagttttttgaatttttgcatgagtgaaaaatcagaccttggtgatgaccttgagctgtaggttataaataactcccacatgcttagcgttcctataatggaacactaggcattaatgtcctgcyatatatttctgtgatacttggctcgatgttrgctttaccataaacatctacctaggaatgttttgttaaaaggcaaatctaatcctctttttcattggaccaactggactttgtgttgcaaactggaccttcagtgttgtgttccaggtttctagcccatgcttggcacccccatcagtacccaataaacatttgttaaataaatgaatctcagcaggatgagaagacaactatgagatgagccacaattactgggctaaatgagcctgagatcacagtagccaaaggaacagctggaccccttggctagagccttatggtgttgtctcatttaatcctcacactaatatcagagtagctgtgatgactcctattttacagatgaggaaattkaggcttaagagtacatggcctgatgtcattcagggagtatgtaaaagctgggactggagccagggtcggcctgctgctaagcccttcttctcatcattgcaccatgcctcctcccaagagaaaagcaaagctctccagactggcgtagggtgagagcattgtgttcttgcataactgaaatgacaggaaagagcaaaagagagcttccagtaaattacatcttaaaaatgtgcagcgatctaaaagagcagccgcaaggtgttttgatattattaatattttttcgaagtttgctgtagttgtctgagtcctttcaggcaggcagtatgtgggtacttaataatttttcatgttgrttctgtgactgtccctaatagttctctcaagaagctgaaataaggtcaagttgttcaaatacttacatagggctttggaacctatcgcacccatgttcaaagcccctaaaacacttagagttttattaatgctggtatgcttcattctctggggaattgcgtagaaactctagcatgaaactacattcagggtgatcatatcagatgcttttttgtgcatgaatttgttctgtttctatttctgtattctgtagaattaaaccctaatatcattaattaatagaaacaatgtcagtaattgaagcactgtataaatatttaaatsaatcacaagattgtttggcaaatgaaggtggrtacatctggaaacttatcacataacttacccttggcaataaaaaggcattttttaactcttcccactatgcaagtgcacagcaatggtttaatacaaacaaattaggaggggagtggaagtgagtataattttgacacaagcagaataaaactcatatgcataaatataataataatgtagtttatttactgtgtggtctctagctacagctgcattctagctgccttgtaataaaattaaagcaaccgattaaataccgattagctggttagagacagatcagattatagcaccaattaaaatcagtgtagaacaatgtattcaatcagtctaatcttycttctgtaaacaaagtcttgttgtaataaactttattttatgcatgtgctttgggtatgcagtatattgttgagatagcaggaactccggattgatagaaggaagattagaagttttactctgcttggcacctaagaaatcagacctttgaggcacattccaggaacaaagacatcatgaagaagggtgcccagatggaaaggctatttgagagttagggtggtacttgcctaagcctagtgrataaaacaatgaagaatgcttttccataagaagcaaaaggctaagggctgggcgcggtggctcatgcctgtaattccagcactgtgggaggccgaggtgggtgagtcacaaggtcaggagttcaagaccagtctaaccaacatggttagaccccatctgtactaaaaatacaaaaatttagctgggtgtggtggcacacacctgtaatcccagctactcaggaggctgaggcaggagaatcacttgaacccgagaggcggagattgcagtgagctgagatggcgccactgcactccagcctgggcgacacagctagactcagtctcaaaaaaaaaataaataaaaaaggaagcaaaaggctgaactctgtgcagaagggaataggcagccttagacagtaccagaataaaggcaatgctggcagatttgttggatggacatacttatgcctcccatacatgagaaagacttgagttcatgcagctgtcaggtggaatgctattttcttttgagacagtttggaagcaacaggagtcatgcatcaatccccaaagtggcatgaaaatgatccatgtccattcagagtaggaacagcagaaaatctaccagaagtctccaggacatttatatactttttttttttttttccaaattgtgcgtgaccagcatatgcattmatatatttaatatttatttgaatcaactgacttttaaaacataaatttgtttttaagggaaactctgccaccgttttaagtaggaaatcatgttacctattatgaagagaagggaaacacaaaaatactcaatgagaagaaattgttacagactaattcaagatagttatttcctgataatgactaggtctctctctttacatgactttgactgacttgcaaaaccaaataacgatgttcataatttaggatttattttttcttttgtatttattattcctaaaatatattcctaaaaacaaagtctagattgtggcattgggatgaagggggaccttgcagtattgttgtaatgataytgggcccagttcctgtttgacccaactcctttttttcctggkgggaaaaaaaataaaggaggctaaataaaagctaagtcaactttcgttattagctgggtctttggaccttctgcacccatgtagcaccccagagagctggactgaacctctggtgaacacttatgtacatattaaagtagcttcaggggcctggatctagagcagttgatccatttctcttcaactgtaattgagtgtcatatatcatctgagcagtggaaggggagaacagtccagaacasycatagcacctgaggaaacagctagagaatgagagtgtttgtgtttacccccgctgattctggtctagaataattggctcaggcctactcaggctgggatgttaccttcagagctggtggccactagaaatgaagaggaaagagagagagaaaggagagaaaattagatagggaaagaaagagggtgagagtgagagtcttgtcctctgcgtgagcagacgagggaagatggacattacagtgtacacccctgagggctccatcagaaagaggcagagtgctccagatggagctgctgcttctctggaatgggagaagtacctgcccttaatcctcactcattgagagaagatataaggcaagtgggagcagggaggagaagacttgagtttcagcaagtaaggggcttgagtattaggtaagaagtgccaaagggaatagacactattctccattcatcctttttatttcccctctgattttcacagcaagccaagtttctggcctacttctcaagaatatgaatatatatacatatatgtttatatgtgtgtatatatgtatatgtgtgtatatatgtatatgtatgtattgcagacaaaagttttcctaaattagtgaaattagtacaaaatgaaaaccttgttaggatgtcagagaagagggaataattgaagggagaaatgacttggaattgtttgcaaatgttgaagacacatctatcacgcatgtggtgtgggaaattgtgatactagaaacgtgaactcagtacacaatgaatgttcaacacctctgctacctcaatcagaaagaatctgtctcaccctgatgagttgctctgaaaataaccaccaattaccccaacttcagtagggaagataatatacttttaattagtggcagactagatagaaatataaatccttatcatcctaaaaaakaattctaccatttgccaacccttgcaagtaataaacatgaaagtgccctcttcgaaagaggcccaccgaggaagtgactgtttagttccctgagaccatctgaaaatgattaatctgctcatcggcaattcaaagcttctatttctgtggtgtctgaaaatttatattattctagaagatttataaaaaccctggtggttttcagctgggmgaagggctttagtggtgtggttatcaatgattatttgcccttccttggatactatagtgactgccatatggaagagggactaaaatttattctttctaattcctgatgacagacactagtaatagagaacccggctttagcttgaattaacaacttttgaaacaaatatagaggtccagtaatggaatgagcagcctctcaatgtagtaatattcccattaatggaaggattcaagcagaatcagagttccagtggaagcaggtaacagagactgaggttaatataagtagaaaaggaatttgttacaaatagaaggatatcggggagttaacagaatcaagatgcgggcaggagggactaggcttagaaacaggaaagtatcaagatggagtctacttggctattaagaagccattacagcaatgagtgagtgagtggcatgtcactcttcttaggattcagagccctggaagagaaggtccaattaactgagcttaggacacatgctcatcctttttccattacagcagaaaatataccagaagtctccaggacctcaaattctggagtggaatgaaaagrcacccaattcactatcctaatggtggcttataataggagaaaagtccctaaaagtgaatcaagatgctatcacaggctgggctcggtgactcacgcctgtaatcccagcactttgggaggctgaggcgggcagattgcctgaactcaggagtttgagaccagcctgggtaacatggtgaaaccccatctctactaaaacacaaaaaattacctgggcatggcagtgggcatctgtagtcccagctacttgggaggctgasgcatgagaatcacttgaatccgggaggcagaggttgcagtgagctaagattgygtcactgcactccagcctgggtgacagaacgagactccatctcaaaaaaaaaaaaaatgctattacaatgagggaatagggactgaggaaccaaaactgaacaagtgatgtttgctatagtaaacatccattaggaatattgtagaggaggattctttgttgggtaggaagttagggagaaagagttggtccctctggctctagcacactctggggcaagaagaatgtcatccttgagagattaggaatttagcatccttaaaagtagtcaggcagacttgggcgagataacatcccctggtttctataattgtgtctatgatcagcttctctttgaaggttttcatctgtgacagagcagtcagatactatagtgtttttatatactatttacagatacatataggacattcacatgttcaaagtttgagaattccttataactttatctttcctcctctsccatcccctgtgatggtcagtttctaaaccctacttcaggtatccttctcaaaactctcataggcargaaccaggtgccccattagctgtgttcccacagcacctcctgtcmgtacctctagcagaawataaagcaaaatagtatatgrtgttagttgtttccattactggattgagaagaactcctggatgcaaggaccttgtgtttaattgctgtagttttagcctgcagcacacagaccaaggagataaacaaatgaatgaaaagacataggaagaaatggaatgaatacattgaaatataaataaatggtagaggtctttcagggttcttttctaaactggtgccttctsaaactgacttctcaagtatgtcctaatccgtacacttctttgtcctaagcggagtgaatatttgatctcttggtatctgtcaggtggaacctttctctggaaagctaaaagcattttactctattgatgtgttctcaccagagctgagccatgagtagttaagtaggcatttgtttctattatgactgcaaatagtatgatttcaaatcacttttattgcagtgatttgaagggattacacctttaatttgcaaagcagtaccctagaactgaaccaaaccaaagctgtggctatactaagttattgcctaagctttcagttcatggacattagtattggggaaaatcaactgcatctctctctctctctctctgtgtgtgtgtgtttgagtatagaatcctcaacttagttgtgaacaaaggtacatacttaagcatagaaatcctaattttaaaaaatgtgaatggtttagacatgagagaaatcacaatcacagagaggggagcctgaatgaagtcagaaagctcttgtgttaaaatggaccttgggcaggttactgatcccttcaatgctgctcctccctgtccattgtgaaatctgtgaaatggggwtgatgataacagaatggaatctatagggttgttttgaggattaaatgaacttgctttctctcagtttgcccactattctgaagagatccaagattcctgggcaatagtaagtgagagggaaaatgagcagagatctttttcttcctgtggctgatcacttaggacaccaagagtgggaacctcggtttttttcccatttcatgctccttcctgcatagaaggggagctgatgagtggaatagagctataagaaatgacataatttgttatctgcagtgacctggtcagagctggaagcagaagcaacactcagaatagcaatattcttgagtatgttatttcagcccaaccctttcatacttaaaacctttccttttgggattttatctgcggcaaaaatgcatgtctggctcttcctagatcttatcccaagatggaggtgagctctgtgggtggccccaactctaattactgatttctttgttagcatatgatttgatctcattataatggttgaaatcccatttccacgacaaccagaagytgaccaaggcctttatatcttcttggtcggagtcctgctctaccctkgattcccctcacttttgtggtcaaaagtayttaattaattgcgtggttctgccagttttttctctttatgttttctctctacacaaggccagactcacctgtgcactttctctcactgtactaaatgtaaatccttgtatttttaaaagctggccttgatagccttctcttctgctgcacaatgtactcccattgctataagtacttcctactgaagaatgttattgcctgaaaagcacttggagcagtgcctagtacatagtagacactcaacaactctgagctgttcttagtctcttcgtcaccattattattattaccttatagttactgtgagaattaaataacaaaatacctataaagtatggtggcatgcagccgggcacatagcaaatgctcaggaaatgttaggtactgctaattaaaggagcctaagccagagatctatttacaaaaatgaaacagagccttatagtgttattgccttggatacattctactcattcttacgtatcattcacttctagtgtactttgcaatgagggtggatattcacaatgatgccttacccagagaggcactttatratgttgctcattgaaagaratacatttatactcactgtgtcagaaaagtggtgttatatttcatgtattcctttttagagtggtgattgtatatttttacaagtgacttatgctcatcattaaaaaatgtaggcaatatacaaaattatacagaagaaagcaacacaataccctaaatcccaccaccgagaaataccctctgaacagttgaagagcatcgttctaaacatctcttaatacacatgtacagataggaagatagtaaaatggatagatagtaagaattaacattgtaaggatgagaataattcagagatcataatatatctgctttatcaataaagatgttaaatttaattttacctgaatttaacagaagaaaaagaaactgaaagtgaaatccaaggaattgttgagcttcagctatgtattttttcaccattaaagctatttgttcctaaagacttttctaaaggttaagaaaaaatataaaaacattcaaaagttggagtttttatgagtttttaactacaccaattttagatgttattcactaggagagattacatgattgatttctaatttctttccagctacctctcttactaccttcaaactatgttgctcatattatttttaccctgacaggctgtcctagtctgtttgggctgctgtagcaaaataccataaactgggtagctcataaacaacagaaatatatttcttgcagttatagagactgggaagtctaagatcaaggtaccggcagatttggtgtctggcaaaggcttgctttctcatkagtagatggtactttcttgctattttctcacctagtgcaaggggctattagctagctctctgaggtcttttttatacaggcactaatcccagtcatgagaatggagccctcatgacttccactgcctaatacwgtcaccttggaagttaggatttcaacatatgaatttggagaagacataagtattcagtccattgcacaggctcataacatcctcattctgttttgcaaatgtcattctcccatttgtttagtcctggttgtatttttatttggatccagctctggtagtctttttaccatggtttctagatgccaggattgtttctttttatttatctcttagctgggtacctttcatcatcaagcaattttttttctctccaagaaggtttcatgaaggttatattctctgagatttttcacttttgagaatatctacctattacctttatacctgaataacaacttggctgataggacattcttgggtcaccttttctttttctctgaagtttagacattgctccayggttttccgagattggctgttgctgtagaaagtgtgaggccaggctgattttcttttccctattgtaattgacttgctttcttcttagatgtttgaacagctctagttttatccttgatgtgtaatagcttaattaggatgacaatgctgatcattaaatttttctcaggatactgtatcatttccacccatggattcagttctttcttcactttagataaatgttttgtgtgaaaactgagaatttttctttttacggtccagtgtttcagggacactgatgatgattttcttggcttactctatctgtcttccaaattaatgcttactttgtttgcttgaacaagttccttgccttttttctcaggtattcagtgaaattattttgagtttctccatcatggtaatttagttttcagctttgactttttctwtttctgtttctaatgaattwattaagtttttattggtatgtaatatattcagagtacttccttaactctggaatttccttytcaaaaccttgtttgtgttttatcttctcaattttgagctgttattgaagattctttttagtttccttaatattataaaacacttatgaggaaactgttgtttaatttcagttacattttcttccagctgagttcttcatctgtcttttacattctgttattttctttctgccattccccaccctctcctcattcaggtagtaagtttgcatggtagtcatgccttttatttttatcctgctcactattaagatgggtgttttatgtttttgttattkttgtttttcttaactggtgtgagttgatcttcatcttccttgatttcaagttccttgacactagtttgtcttccctattctgagctatggtttgagggctagctgctgctttttacatacttttctaaagatgactgattttcagaatgtggtcttcagaccagcaacatcatttaacagggggaatctgtgggcctcacctcatacacattgaatcagaaactctggagatgtggcccagtaacctgttttatcacaaggctttcaggcagctctgaaacatgctgacattaggaagccactgcggtaggaaatgtggagggtgagggtggagaaggctgtggggaagcagggtgcagcccacactgggcgacctgatccctgctgtatcttccgagatcctattaatattctgtccctgggcccattcctcaaccagcattgttgcagtctttgggctttcaaaggttctgtcacttggcacattgctgtggaagtcaacaaactctggggacccttccagcctctgmtggcagggctgctgtgaactgctgctgtgtgcaggttgtccttgaatggagaaacataggtgaggggcccggaaggggagctcaattccagtctgtgctctgcctccaaaaaagcatgcttggtgcagggctgttgcatccgctcatgagagggatgcatttttctaatttggtctgcccagagggggcatcttctcataaaaagaacatctataatatgtactgtagtcctgataaggtctcaaaakgacatgtaggagcttctataacaaagttgtttttctcgaatttgtctgggtttgcctcatcactccccttcygtcagtccataccttttcatatttagggtagttctgagaaacttcagaaatctgtctacttaccttctttgattagtaccgcttctgggtgtgtgtagggttggattagggtgagttggtggggctgacktatcagaatctttgttttcttttcttaggctttcaaaatttatagcaaagcttataccactttattggttttataggtgttgggtaaggtattagctttttaaaatccttatcattttcttacttttaaaaattagtttcttgcagggtggaggtggggagtgtgattctgtaatcctgccttactctactattagtttatgacagatgcactatttttttcttactgacacaaatgaaaacaattatttttgctgcttatttttttttaatcaagtaggcttccttgtttgtaagtagcagacccaactttgaataacttatggaaaaaagaggtttgggagagtgttgtgtaggatatggaattaaagaacaagtcccagagaagagctgrtcattggtgcctttagcaggatggatctgtggatattgggaaggccatggccatgagattactgagytytaagtgccttctgggcatatgatgtgaatggcagccctaccagtacagtgaggaagtggctgcttccttaaagttgtgtttctcaaaagggagtgattttatatctcccctttccccatctgaacacatttagcgacatctggatacatttttggttgtcactactgggaaggagatgctgctggcatctagtaagtagtggccataaatatcttagagtacacagacagctcttcacagcaaagaattatgtggtctaaaatgtcaatagtgctgaggtcaagaactcctgccctaaagaaagggagtttagatgggcaagaacgatagctgttcattattatacttctcaggcagtaggtgagcattctcattgatgtgggacagtgtgtatgtgctggtaccattaggacttctggtagtattgcattccttttttttttttttttaacttgtcctttttagcattttacttccttgggagtacagttgtgatattgtcttactgttgtaccaacatgcagaagtcaattttaattcactaatgaaagccatgttaatcttccccacaatggttaagtttataactgtgatgatgtttctgatatttgactccgacttaatagtcaccttaggaaatatagaaaacattgatttggtaacaaataaaaattttagatccgtactcaaagtatcttatctttgagcctcacatccttcatgcaaaactcactggtaagaactaccttttgttttcttaattctattgatatttgcaggtgaccacattgtttgtcactggccaattgactgtgactgtggatatatcacctaatctctctagactgcagtttcaacagcaggtatatttttaaatgagtttggaagaatagtgagcccctttgtgttctaacacaataaaattatagacaatgcaagttattacagagtatatgagctctcccttctgtaagatcgaggattgggcaggtttctgatctggcgggatcaagtttttggtaggcaccccagtaccaatcttcctgtaacttttcttttgctagtatgcccacagcaagatacaatggaacactgcacattaatacattttaacagattttaaacgaactttctctaaacagatagaagaaaattagaacattcctagggaaatcccttggcagacagcacatctgtcagtgatttggcattgctagaacactttcaccagactgcatcagcagtttttctcaaaatgtgaacagtatgtttgctaaaagcaaacacagtcatgtctgaattgcacaaacttctctcaaatacaagggaatgtcactgtctacactgtaatccctcaaattatcctaaccacaagttcttgggaaaaaaatccaccaaactcagaagcggtatctgaaaaagccatttcatactatagaagtttctgcaatctgtaagcaaagcgaaatttgactgttttttggtgctgataatatgcgaggatgtttatctttattacttgctagcagtgtgatatatcattatataaacttgcttttacttctaattaaacttttaaaatgcagttgcttttctttgctcttgcaacaacatggaagattaagtgatttttgttgcccagtggaattrtctatcctcaaamactcaacacaaattaattgctgttggtgaaatacattttaaaatattataaccctattcattttaggaaaattaatactccttgtgagcaaatattttaaccaaaatatggtaagtttattaataattctgagaggagagaaaacacagcttgaaaaatagtcaacattttgcttgatcgctacctttcctgctaattattttgagggatttttaaagcaaagaacacatttattcagctgtatccattaatctggaaaatgccctctctttaaattgtccccccaaatcttgtttctgaatattaagttgcctatgtgctctccaatatgaaggctggaattaaattgctgctatctaacttcgatggtgggtgcttaggatgatacatctttccagacctttttatactttcaagatgaaagaatatgatctaaacctccttcgctcaaatgccaattcctcaatgtatgattcttcttggctttcctgaagccaagagctgtcaacattcttttatttggtatctctctgatgttgcttatttctttgtatctggcaatctacttttgttgttcttcctctaacttactagacagagagtcctggctcaatatctctcagctgcttagcttctctgcatacaaattgcatagcttggtcattttgaactttaaaacagggtttcagataaagcaagaagaattaggtttagttaggttgataagatcggcttttaaacagtttgatgaactcccatttagactttattagaagaggagcctgagttaccctcccatgttcacacttgagggtcttaattccctgacatttccttggcattagagactgagacttagacttcactgtcatttgggtcctcctagagactgaactagagcttttcatgaagagctggatggtttctttgcatggtgattattttcttacatgagtcttttggagaatggtatggatatgaatgacagcgggtaagaactgagtctgaaaaactacagttcaaggtatggttctgctgctttctaggtgcaagaagaaagctcttagatctatatgagcccctggttttaaaatctataaaataacaatgctgctctcctaagtatgtataatgattaaacatttactgcttgttagctgctgtaaaacaattttatagcaaaagttctcactattattggaaatcgatgaaaaggtttagggctctagggaggcagggttttgaaaaaaatctcttctcccccatgttaatgttgggtgagtttgacttaattattttctgtacactttctcctcccccaaccattatcttaatatttattcccattttcttatggaataaataggcatactttaattctgcaagcctccgttgtccataagcacaggaaatgaggtggggatggtgctgtgtaaaataatttgggaagcagtatgtctgcacaaaacagaakaccagaggtctctgataaatttcagttttggtgtcatctagatagttcaaagcacattttttttcactaaaatatctgaaatcaaatacagtagaaacagcacagggggacaatactaacatctgtcttcacattattaggttcatttaatttaactctcatctcttgatgatgatggtaagagccagcatgctaggcgttgtattatgagatagraagtattatcatgctctctataggcagtcacactccagagtctctacctgagatgtgtctagtactattgttagacttggagatataaaggtggatgagatttagccattacccacaaggagcttacagtcccagtgagaagtagaatacaggggtgcagattcctttactatgagactgtgtaggaaattgctgcaggagtgattcaaacaccaagaacagcaaacgggagcctcaatcttgtctgttttggagatccagaaggagakagcaattggaaaggattttggagattaggtcatgtttccattgcagatgagactgagggatgataaaagagggatgggcaggagtgaaagaatgaaaaatagctgagctgaaaaagggtgatcccaaaggctagtgcagtgtcggcaaggccaaggttggagaacttcaaggtggttcaggagagcctgcagcctgtgmgtgctgaagaagggcatgaggtttgggctcgaatgaccttggagaggaattctctaagaatggcctagggaagaagccaacactgtatttgactgaggagatagtggagactgggtgtttagtagattattccaagaacttttttggttaattacaggagaaaaagaagttgattatttaaaagttcataatgggtaagtatacttttatttgtaagaaagaagaattaatagagcaatrataatggagaaatcagaagggagscaaaaatggagagaagagagtttttctgagccctagaagaagctggtaagaggtgttttattatactttgcatgggatttggatgttaactatagactgtattgcaaaggaaaatatattatgggaccaggcatggtggctcacacctataattcccgtgctgtgggaggatctcttaaggccaggagttcaagaccagcctgggcaacacagcaagaccccatctcttaaaaaaaaattagccaggcatggcggtgcatgcctgtagttacagctacttaggaggctgaagtaggagaataacttgagcccaggagtttgaggcttcagtgagctataactgcacgayggcactggcaacaggagtgacacctagtctcttaaaatacacacatacacacactatacacacacacacacatatatayatacacacatatatctacacgtatatacayatacgtatgtgcgtatatatatatacacatatgtccatatatacacacacatatatatgtgtgtgtgtccatatatatatacacacacacacatatatacatatttatatgtatatgtatatatttaggrcagaaatgcttggtgatcctccatgttctttccctttaatacatggctcactgcaatttacaggagccaagtataaaaaaaaaaaagactaacatggtgtcctcaggcttaawcctgtacaattgccttctgcctactgatgtttcgctttcccctaatttctcctcgttggctctcctttgtccatcctactttcttgatgcctgccactctgacccctgaattggttgctattggctcctagcttttttctctgttctctttgcatccaaatctagactgttcaactttggcttgaaatgtaatgcagatgaatcaatctgtaatgctcccttttcttggtgaggccagactgttgcttctttatatcctgtcctcacagtagctccactgtgcttggccaggtagacgccttgggactgtttctgtgctgtcccagtggcatgtgaggaacacagcaarggatacaacaggtggaaasaaaaggtccaggaagaaggaatagaaataatgaggaaagaatacagttggaaggactggcctcaaataggggagaaacagttcatctacagaaacacagcccttggaagcagggaaggatgaagatgctgcaggatggagaagggaaaagttaaggaactcctagcagagggcccaggcaggatagaaggcccccagggagaaccagatatgggggaaaaagcaatgcaaatgagaagaagcagaggctattctgggctttctagaacaagggtggcagccatcatcacatgtggctggtgaagactcaaaaggaagtagkggaatagaaaaccctttatagtgttggaaggggagaggagagggaagggaggaggaggattcaggtgtgacctgacttgaggctgttggcacaggaagctggaggtggctaacctagaagccagatgtcctatgtgatcagagtcagctttcactggttggtcctgtgttggatgcagggggcaacacttggggaagttggcagttgttgattaagtaccaaccatttggggccgatggctgcaaaagttgtggtttcctcgactggtttctgcaggtggtgggtcagtgttctatttttctatatagtctggacactgtccattgaatgttcagcttcccatgggctagagttacaatggttgtgttcrctgtatgtgtgtactatatttcttaggacatgctttgacttgcggcctggccagatttgagttayaacagagctccgtgcgattccagctggcagtttgccagtgtactgtttccacagactttcacacatcctccttcagtgacttctatacagaaaactggaaacaatatttttataggtgttaacttttctggaaacattaaaagtaacactcaaaatgcttttcttttgtgtttactcaaatatagttctcaacgcagctctggctttcagagaagcctaattactttcatataccatgagaagtcgatagagcattgggaaaagttatacctataaatttatattacttgagggagaatatttggtcttagaaatattaatgcagcctcccatctcataggaattagttttttttgtgaaatagaatttgattgactttctgacccaccaagcatgtggcaggggagaaatgtttttccacattggctgtctctgagttcttaattctaaagatgtcagcttggagaaagggcaatttgttcctaaaagagctgtacctgcatatctgtctgctttgttcataggagagatcaatagaatggaggaacagatagtcagacatagtgtcagacaattatttggaggtggcagccatttgcagttaacatacgactataacatactccaagaatattttcttctaaatcattaagctagttattatttgcattgagcagcaaaagttgaaagttgccaatgtagaaagctaaaatagagaacccaggggcagggggtgaaatcctggctgtgaatgtttttcaacactaatttcaagcctgttattgtcctgatagaaaccccaaatacctttcttcagtgatatgcatgcaagtgtaaattaatgtgccagagaaaattattatagagaagtgtcaggtcacctgggctagtgctattctttgtaatattatacaatatcaatctacagtaatacttttttgcaggctagttggaggacaaaaaaggatctcctgtccttattccttatcaaaagcagtcttgtatgtggtgttaagggtacaaagtgagagagtataactaagtttaaccaatagaagattacatactcagaatgtatgttctagtcaaaatgaaagtgtgggctctgcccactgaatgaaagcccacattttccccctagatgttggagaaaggtcttcaggatacccagcgatgggcaggcttctctttatgcctgtctgtgccatcaatttgaggtcaagctttgctattgctgctgttgacttctttcaagccaggcacagccactgggacctttgctataaccatcaagacagtgctatatcccaggcacaggaacccactgtaaatcttgctagatgaggggctagaagagaggacaagatctcacggaggctctactcactctctccagactcaggctactttcctactacctctgacgcttacctttcttgaataatccagctctgtttcttctgggagcctgcacaactgcctagaggaaggattacatttctaaccttccttgtttctaggtggggttgtataatcaaattctgacaagtgacaatgagaagtgatgggcgcaacttctggaacatgtcattaaagattggaagcctgccctgcctccatcctgctgcccaggcagtgaatggcatggctggaatgccatcttgggctaggagaataagaaccatcacagaggtggtagaagagaatctgaaagcagcctgggttttagatgaccacggtgccagtggccagacaagttctggtctgctggtcctcagacttacatgagcaaattagaccatgtctgcttaagccattgttatttttgtctgttgcagataggtatacctgatttctaacaaatagactagatacatattttttattcgcatctcctttagtattctcagtaaattatcatggtgtatctatgattttatatatatatatatatagagagagagtatatatagtatatatatggaatatatatagtatatatatatatagaggttacatatagagaatatatagagagataatatatatataataatatatatattctacctaattttgatacaatgtggagttcaaaatgtcttaagaatacatatagcttctaatttgatgattattttgttaagataaatcactttaacagcttttcattaaagggtagttttgaaatccgattttctgtttcttttttccccaccttaaattctgaaacacactggaagctgttctgactggcacatagaccatgtaacccaaattaatccctgttaattcattttggtatggtcggggtaaatgctccccgaactctctcttctcccaaagccacatgatttgtgggactttgggaagtgtgtactgtaaggtagagccagacaattctcctccaaatagcctaagttagagtgtgtcaaaacggaataatttctgtatggaaagcaccctcttctgccgtgtatttgaacgaacaaactaaagaatgaatctcagaaggctcatttcattttcctctctgccattttcatcttgtttcatagtgtaacatatggaagagctactaactttagtcttccacgacatggggagggcctgatgaatgtacctggattttgaattgttttcctataaggattcagcttcatatgctggttattatgtgtgtgttggaattttatagcaagtggatttatacagcctagtggctgtttttccttgttgatattctttggggactttgcttggaactagctcctgctctggggctccttgctgtcaaataatgtaaacaccaaggaaggaaaatacgtctcagtctgttaagtccatcatctttctctaagactatctctcattaggtttggaaatttttgagtaaagagaaggtgggcctccaaactagagggtcatgctgtagtttaatgagagtgagggttattgggaggcaattagggagcaaagtcttctaggatctgttaaatgtccacttggtttttcagagttggtgaaaatgtatttgtaatggaaaatatgttttagtttgtggggtgctatgcttttcctttattcttatcagtgggcttagcttttcagaaagttctttagggattttatgacatgagagctgaacatattctaatcctgggctgactgtatttcaggtagaaackgtactattgctgactttcatggggtttaggtgaacttctatgattaagcartagtatttccctaattctgtccatttttcccccctggatgaatccttcttggaaatcatatcagtttgcttcctcctggaagccttccctgattccctcaaggcttgatgaggagccctttttctgtaatcctgccatagcctgtgctctgtccctttgcgtttaagtcatcagttcagttggctgtgtcttcctaactcgagtgcagggtctctgcctcattcacacttggagctgtggtgcaacatgtgagtgtggagtaaatatgcgttgaattaatgtatttttctagatggacttattttactaatggaataagattttttaggcatgcacacagaagttgcaaaataaatatttgttgattggctttccagtgcttaagtaattcccygctgcaaggcagccacctctaaaactcattaatggttttggatattatttataacattaaaacagttttctgaaagtgcatatatattatgccctgtttcctcctaagtgcatggactctatgaaaaataaacaatacatcaataacatcctaagaattactggaagaaacagcatgttgtctgttattctctgggggtggagtgtaaaagtggtrggcaaggaggggttctagtttgctgctgtgrcgattagtaacagcatttgtagtatgaattttgattaacttttgaatccatgaagcagaccactgagtctgtgagtagatgtcatttgaattagatctttgatgtccgccaaggtggtctgatctgaagcgttccacagagttcctcccttcttgcagacttgagcaagaaaaatttggttcataatatttaaaaaaatttctaattgaattacaattttaaatcgttaacttattagagaaaaattattttgcaatttatttttaaaacttggaagagtaaaattaaaagaggactccttccagcagtcttgtagatgtgtcctctcttggaggcatcactgttcacctgtgttagcaggcccagaaactaaagtttgtaaatttacccagagttgaagagggtcaaggccacagattcatacttacctaatgcataagaagatgataaattagaatgccaatgtattcattctccaggagaaatatagctgccaagttacattcatgtttgctggtcagcactttctccagtaagaagtcgaagtggcaaattaaatcacaatcaaaaatatactgctttggtgaaggtgtgggggaaacaagtagtatcatatactattaatagaagtttaaattgctacaacttcctgggagggaaaatttggcaatatctcaaaagtgcctgtatcctttgcccttgccattttgcttccacagagttatcttaaaaatatatcccccgacgtggacaaagccatatgaagaagagtgttccttatagcatcatttctattagcaaaggattagaaaaagtctaaatgtttattaaagtgaactggtcaaatacatggactgtgatgatgttcaaaagaacgatgtaaatgtgtatgtactgtggagaatggcctccaggatatgttattctgggaaaagtgaaggagagaactgtgtgtataatgggcttcctccctttgtattaacagggaggagttcacacaartacaagtgattggttctacaaagtgtgtttctgaagtgccagaaagaagtggttgggcctggaaggaaaactcacttttcactccacgtgctttgcatctgtttgaatgtgttgccctgtgcttattaccttgtgcttacattgggttatactttttctctctmtatataaaaaggttaatttgacattcaaatagtttctctatttaaatctaaaattagcaccaaggaaggtggtcttgttacataaccctgttgctgagtcacctgtgactccaacgggtgagtcacctgcccggtagaacccataggctccaacgaggagtctttctcaggagaatgtctttattctttmctggactcatgcagtcattgtctcacatatgtgtcatcatcatatttatgaccaatttttcctggagctaaatgctgaattcttaaacttgggaaacttctgacttccataagcaacacatatacaagtcacttcttagggtaaggtgaatctggtgtaaattacaatcaccaggacaggcatgatggctcacacctgtaatcccaacactttgggaagctgaggccaagaggatcacttgagcttgagaggttgaggctgtagtgagccatgatcatgctaccgcactccagcctaggcaacagagcaagaccctgtctcaaaaataaatgaattaaaaaaattatagtcacgagaggagtgtgtgcaaatgcagtcttggatcccaccccagaggttctgaatcagttggtctggagtgggctcagggacccccagcctgagaagattctaatgcagatgatctctatacccttccttccctccttccattcctctctccctccttcgattctttttctccctttctccttcccctctctttctccttcccctctttattttcttctcttcctttgagaattttagagagtggcatttttcacattccgtacttagatttcagtcatttgactgtttgttcttcctttattgaagatatatattttaaagaaatcagtaaattgttagtaacttcatttgttctgtgtcagttgatctttagtggatatagggagaaaagaaaatgaaaatatgatcaagttcagctgccttaagggctgagagaatggcccttccaagtgctcagcttgtaatgagacccagattattatgcataatcatctcagcctaaatccttcttggtccacgtgaatgatggaagatggtaatttgtctctaagagcaaggaagaaagaacatttgagttaagttatggacagctgacctttgkttttaatcacaactgcttttaaatggtaatagctagggaaaaggcatgacagaagagtggtggaagggaaaaaaaaaaggagaagggkcattgcatgatctttggagtcaggcagacttgcctcctgatacagattctaccccagccaggctgtgtgatctttgacatgagacggaacttctctgtgccaagtctgtgaaatcaggataataagacaaccgatgttaccatggtcagaggataaaataaaaatataggcatacagcctagcatagtgcctggcattagcagaagctcaataaatagtggttaattatattaataaagcagcaggtaatggaggtagaaataactacatgggcttgttagtggaactgcgtggcttctaagggccttcatcctcactgtcaggttttacgcctcaactgtagggacaaaagacatttctctaaattcctttctttatcccggtgaatatcaggtgattacttttttctctttttgagttttttttaaattttattttaagttccagcatacaagtaaagaacaagcaggtttgttacatgttacatatgtgtgccatggtggtttactgaacctaccaacccatcatctaggttttaagccctgcatatattagctatttgtcctaatgctctctcttcccttgctccccacccgccaactggccccagtgtgtgatgttcccctcccagtgttcatgtgttctcattgttcagctcccacttatgagtgagaacatgtsgtgtctggttttctgttcctgtgttagtttgctgaagatgatggtttccagcttcatccacgtccctgcaaatgacattatctcattccttttttggctgcatagtattccgtggtgtatatatactactttttctttatctagtctgttattgatgggcatttgggttggttccatgattacttttctgatagagagcttagatggaaggaaataattttttaataaatttgtaatcctaggcaggatgtttgaattttttaaaatttttattttaggttcaggggtacaggtgcaggtttgttacataggtaaactcatgtcatgtgggtttattgtacagtttatttcatcacccaggtactaggcatagtacctaatagttattttttttgctcctctttctcctccaaccctctgccctcaagcaggtcccattgtctattgttcgcctctttgtatccatgagttttcatcatttagcacctagttatgagtaagctcatgcagtatttggttttctgttcttgctttggttttctaagtataatggcctccagctctatccacatttctgcaaaagacgtgatcttgttctttttttatggctgcatagtattccatggtgtatatatacaacattttctttattcagtctatcattgctgggcatttaggttgattccatgtctttgcttttgtgaatagtgctgcagtgaacatacttgtgcatgtgtctttatggtagaatgatttatatttctctgggtttatatccagtaaggggatttctgggttgaatgatagttctgtttttacctctttgaatttctaaagtctccagctgacacttctttgctgaaggtgaagctcaggtttttgttgttgtttttatctctaactttaaactttgctggataagagcacatctgtctattttgatgagtcaatgatcaagtcatggaaactatcaaatagactggggggaggttatttcacaggattgctgtcctcctaccctgcttacctttatttattcattttgacaggatctggaaatagatgtaaaagaactcagcagtttctattgctcattttactgcagccagtgtgctcatgtgagagggatctcagatgatttccccctttctctgtggttccacttttggtgcctatatgcaaatctcagctgtgtcttataaaccagcattcttgaaagtgtgcttcrtgggatactagtccaatgagattctccatgagaagaaaattcttttgttttaaaatgtatggataatactgtatgttctaatgccctacttggagagttctgatgtacattaatatactaagggctctgagaagtccccaaggagtgaaaacccacatctcccaaatttatccaaatctggaattaaaaaaaatagtaaaacaactgtaataatgcctataatagtgtttcacagaacccactttgggaaatatattttcattgacaatgaaagggtcctaggtaattgattctgtcctatgacttatgaacagatcaagaaggaaaaatagatkaccggaaggtgtgtttcaaaaagaaactggagttagaatttacatagtgaaatgttaactttatgttgagttgtgcctttgggtaccaagcctggttgaattggtaggtccactctgttgactcagtattgataggtctttcttgctttcactgcaagattttttaagtcttggaatttcattaaatattttgttgcagaatgtgtaacaagctttggatctgaatgaaaaataacatcatgtgagtctatgaataaataattgaaattgtctatgaataacttaagggtgactaccactacagctttacaatgtaaagagtttcagtaaactctaacaaaatgcacctgtgtctgactccaaaaattgctttctgaagattgtagaggtagatttatttgaatctacgtatctctgattacgcatgaatgtgttgtatcgtttcaggagcattcaagtcctggatatccttttctaaagcttagaaattttcagaattagttataggccactcagcttcagcttactctcacatgaactattgtcatatttattgacaaatagggagggatataatccctttttagatattccagctcacctagtagctataaatgttctcttttattttctaatcttgcagaagtagagggaaaggattgtattaaaatagttttgttgatgcctgaagtgatgcaaaactaagatgaaggcagcaaatgcagaaaaaataaattcaaaatgatttgtttagattaggtttatgggctcatgtagtttagtggagtgagaccaggaaccagaaataatcagagagcctcttgcttaaaaacaaataatatatagttcaggaacattagaacattgctagatattacattgtaaggatcttcattcagtagtagcaaaaataaaaaagggaataggctcatggataattagcatgatgcagaagtgaaaatggcacctcttggatcacagttgtacaatgcagtgcaggactttgtaacttctttccttttgtccatgttagatgaacacataaaattacagaagataattgaagataaaagattctgataaatttctgatcctatgcaaaaatgattgaactccttagtctccagttgaccatatttaatataaaaggggaatgcatttgggattccaaagggagtagtaactcaaggatgatctaaaatggtgattaatcctaaatacatttgtttattacttggggaaattctttcctttccctgaacccacagttactgccaccgccaccgcagctcayragggttgtatgtgtgtatgtgtaaaacagatctaagaggagtttgtctgttggaaaggggtaatggatagaggtatgctggccaatgtttaacaattgctctcagaggggraaaaaagcctaatttgtaacacttgtgaatacacatttctgaatttctgtggtgctgatgctcccaccatggccaatttcaggttatcaactcatgtcaactggctcacaaaatgctgaaaaatataatgagttcttctatgagctgataggagatggctctagcacacccctgctaagagctttcttaggtcctgktcattctgtggagctattttctctaaggaactgtacctatacctgtatctgcagctgtgaggagcttggaggctctggagaatgcctttgggaaatgacagccctctgtgaccttctggatcattttcagattccagattctgtaatatttccccaagaagaatatttcccagagtgctgatgtgatttaactgggatacttttactactgagagaatttgtatacaatagcaaaaagtggtttgggggaaggcagctgattctgaaatactagctgatggtatctggggatacatttgctctttgagcatggagccattgctagatatctttgtgacaagacctttgcgttatggcaaatgaatacaggacaccttattcaggacggggattggcaaattaccacctgcccactgaatccaggccacagcatgtttttatgtggctcataagctaaagataacttttacatttttgaatggttgaaaaagaatagaaagaagaataataattggtgacacatgaaaatgatgtgaaactcaagttttagtgaccataaataaagttttattggaatccagtcttgccctttttgttcatatcgtctgtcatctatatcctcacatcatctctggctgctttcatgctacactggcagaattgagtagttgcagccaagaccgtggggcctgaagaacctgaaatatttactatccagctctttacagaaaacgtttgacaacccctgatctaggaaataagtctctgaggaatatgaccagctagtccaaggttctgtacagcggctgaagacatagcaatgggaatgccaaatttatttttaatggattggaaagggtttgcataagaaatgaagaggaaccaaaaacagyttgtgaaaactgttaaaatataaaaccagtaaggagaataaggaatttctcattctgcccgaatcacctcctttcagtttctttcattacctaatgctgtgtaaagagagttttttcctcctgttttcttgtgttgacatgttctgatttagacgcttgtcttacgcatagggaccatgttgcttctcactcaagcagtaaagcggtatcattggtgattgcaagggctggttttgaagtcaggcagatagggttcaagtcctagctcagctacttttttgatatgtggtattggacacatttctttgaacacttctcagctttagttttcttacctataaaatatagatttgttctgagaatcaagtaggatatttaaattgcttagtacaggatctgacacacagtaaacctataataaatgctactttctatttgttgttgttatgtttgtacaccccagggtcttccatatgtggatgtgtttatcttttgggttaagcttttatccttttagttttagcagacagaaataaacctttaatttggcagtatcttcacatagaatacacatttttttttatcccaaatactccatctcccagaaattgtcttgaaatgaaacccatgtgaatgccacagtcttagtcaatattttaaactttggtctgttaagaaggttgtatccgcattcatttcttcccaagaggagactgccctccagtggaaataattctggtaaggggagaaaatgattttcgtagttcagactatctacaaatgttttataaaattttctgttaaaatagacttacttatgaaatttaagcttaacttcaagggagaaagtctttgctgctctctgaatgccaccagtctgctctgacgagggcattcatcaattagacattcatgcctttaatgactagtcgccccccacatgggacaggtatgcctatattcaaatgattctcaaccttggttatacatttaaaaactaagaagcttaaaaatatcctgatgtctcggttgcaccccagtccaaataaatcagaatctctaggggatctaggcatcagtattttttaagtcccctctacacacttgattccaaagtgcagcctccagccaaggttgagaatcactgcttcagacccttaggttttgaagcacacttttgtttttttaaacaaagtaaagcaaaaatcctgccctcacattgcaatggtgtttgctcttcttaagtgtgcatcggtgcagcatccactgtcacctgcttatattgaaatctcatctccagggaaatttactgatccaatcttatttcatttgcttgctaataaagaacttttaggtagtaaaagagtatgatgaaaaaagaatctttgatacttctcccactgtaaatcccactgatggattctgtttgggaccaataatcacttggactttgataacctcatcactaaactctgcagaaacatttgagtttacctgtcaaaaatgcatttacrtaggatgaatttataaaagaatatttttatatatttactcttagccttatgcatatacatgttgcttttattagcctactgttctttgtgtttagttcattatagatatgaatctaatgttttacttaataggaatcactatggttttaccgagattgagacagtggaaggataattaattttgttatctgtaaaacaaaaatattacctacctcctagagttcttaagaaaagtagaggagataatatgtacaaaacagcctagtggctggcactaagtaagcagtctaatgttgttacagtatcaagacagcatatgatagaggtcaagagcaaggtactagaattaagttctctaggttcatctctcatctagactacttgtcagctctgtgatgttagacaaattacttaccctctttaaatctccattttcttacctgaaaacttctaactaccttttgtgggggaggatgagaattacgtatttaatgtgcttgtcagtattcttggcatatgtaagcaccttttcacatacataaagtagaaataatgtgtgtgcgagtgagcaagagagaatgagaggttgagattccatattcattcagagctgcaagggactttgccttgcttcttgtgtactctctaactccgcagcatcagcaccacctggaatcctattagaactatgcaatctcagccaccgccccagacttaatcagaatctgcattttaaaagcttcctggtgatagatgcacatttgagcagccctgttctaatctacaattgccaagtacaggacaaaattgctaccacttcgctgtcatacacccttggcaggcatcactcatcaatcatggcactccatcccaccagcgtcctgcctaattactccagacagcctcaactaattgataggaattgtcatgagagrtgaaacctgtaatggaagaaacttttgtaaggaagaagtgacttacctgagtgacaaaggcagtgcattgccaagacagtactcaaacttgggatttttaatccccagttcagtgatgctgtacattattttatattgccttcaaattccattcagcagcacacaactattgtatagctggctttgtgctacaaccagaaggtgcaaaaaggaaattaatattaaccatacagataaaatgagatgaaatattaaaatggaagttgaaataggtttaaatcagctaaagatgttactgggattaaaactcaaagtctagtagtaattcctatcatcataatttaggtattgtgattttaaaaaatcagggatgattgaaaaagagattattcattaatttcactgaactccaaaatttgtttaaattttttgttcayttaagcattttttctttaacagggcatgtagtacttgggagtgaagttgtcattaacgtgaccactgaatccattagacaacattccacaaaaactaattttgaataggacacaaattgtagacatttatacactgtatttgcctctttctrtaggttttgcttgaaattttaaattttagagttggaacgagcctcaggatagcatatgatacagtttttgtctcttgggaagggagaaggaattttattcatcaccaatgagagatgtgcagacatgaaaaacaccatcctagtatctctgaaatttatcttaagcatcacgtctgctattgcacggaggctgctagacattttctgactcattactcaaatgactcatgctccatttagtgtggtgggaatacatggagaagtggccagatccaactgagtaagtaagcaactggccagagttccctgcattttgttacctgggctgttaatttgctagaaacctcgagacattaacgttcctctgaagtatctgctgacatagaaagcctctttctccactcaggagaatatgccaacattttcccttctcaaattgaaacaggakatttccaattgtaacatctcaaatttatctcaawctgtagtaatagtttagctaatgtaagacagactgtaatttataagcatgtatatatttatatgtgtgtgtatatataggtatatatgtgtatatgtatagacatgtgtttatatattcacatagtgttattttaaccatactcatgttaagcattatagtttgtcaacatacatattaacttgccagggcactaactaagtcaacatacactttatttttatgatcaagaaatgttcacatacagtcatgcaccacataatgacattttgatcartggtagagtacacatacaactgaggtttcataagattataatatatttttactgtaccttttctatatttagatacacaaatatacttgtgttacagttatctacagtattcagtatgttaacatgcagtaaagaattgttgcctaaaagcaataggttacagcatatagcatatagcgtatagcctatgtgtatagtgggctatacctatctaggtttgtgtaagtgcactcttatgatgtttgtgctatgacaaaattgcctaatgatgcatttctcagaacttctcattgttaagcaatgcatgactgtacaggtatgcttgctcctctactacttacaagtgatgggtgaaaggacaatttgcaggtgcatggaaaccagaaccaaggagctataacagcatttcttgagataacattgaagatcagattgtaaaattccctttttcttgtgastgtttactttctttgcctgtaattaatgtccaaagacatggtatataaaagaagacatctagaaaatgtttcctaggaattagctatctgtaatagtaaaagaataaaattgggaaatgtacctatataaatataggcacatatacactaatttttgtggctttctttagctgtggtggtgaatactcccttcaaaaatgtttcatttattttagaatattaacattaggatcagcaatacccattttctccttagagatggctattttgttttatgtgaacgtttgaacttgttttcttttaaattattctttaaatgtcctcctcatgacaaaaccttgtgccacatatgatataagctgaattggttaatttctagcaaatgaaaatatgcaggtactttataagaataagatcttgtttcccatgataaactataggttgaataaccaaaggcagatgatgtgaatatttatcgtgtgtgtgtgtgtgtgtgtgtgtgtgtgtgttttgtagatggagtcatgctctttcgcccaggccagagtgcagtggtgagatctcggctcactgcaacctctgcctcccaggttcaagtgattctcctgcctcagcctcctgagtagctgggactacaagtgcacaccaccatactcagctaatttttgtatttttagtagagacagggattcaccatgttggccaggatggtctcaatatcttgaccttgtgatccacccacctyggcctcccaaagtgctgggattacaggtgtgagccaccacactgggcactaaagtgtgcacttttaaaagattgtagttctccatccctttctgtatttaaatgtctgttccttgtgctgtggtttagaaacagatttcggaagacaagttgatgatttttaatcatgttatccctttggtacatgatgctgggctggagctacacaaagtgagtgaaacacacttagtcttagggctttaggaacttaaagtgatcccttagccttttgaagagcgtgctatgaaatttgagtcacctggaattrtctaagcaacttaattattgttagctaatattagaaaaggggaagcagaagattgaagtttgtttttgtaacagccaatgaggcatctaatgattcaaatgtcgctcttaaagctaacttccttaagacagagcatctcattttcataaatgtcctgaggcagccgaacggttgtatatattcatttaatagaaataaaaaagacttccaaccaaatttcagtaatcaggaaagcctcttagcactgatgtcttctcagtgtgcaaacaattttttaagaataccctgaggtgaactctgcaacctttttcttacaaaatatacacttttgggattatttgaaagtggactctgccatcaaattaaatgaaccattgactacgttttcgttaagaggtctattaccagcttccttatttagtgtacttttattaaaatactattgcactttacatctgaatcctcataattyagatatttaatggacagtcatagggtattaaattgtccctrttatttttgacccaaaagagagcatggggcacctaatgtaaggggctaaattaaggagagaggaatctggttagcttctagacatttggaaagcctatgttcttggtccctcaaattgctgctgaaaggcagcttcagaatttggtatgtgagagcttgttccctgaactagcwcagtgttaatwtgggagggccagaaccatgtagtaccaaacctcatgtttatgataggttaaaaccaaaaaggtacctgttgatcaatgaggggtgttatatttttaatcagtgtcctcctttttatttatttgaaaaacagcatacaatttttttccataattagatctctattttaaggtgatgatcgacaagttgaatattgaattatctatatcactggatgagacctgtgtgtgtgtgtgtgtgtgtgtgtgtgtgtgtgtatgcaaatggatgcaaatatgtaattagacccagaagctatgggaaatgagaagcatgtggattttcaaactttccaaagtgcctagtaaaatgtatattaataaagtgggctttagggggataggttttcatccaccaccctgtctgttacatggaaagcacttttcccattacttttctattttaaatctattcccctgccccggctgattgtacctttctgaaatgtgccaggcagagaatctcacatctccttttagcttggaaataataacatcttcacattttcacggtctgttctgaaataggaacttttcatttatgcttcactcccaattgaaataaattgattaacgtcatggaattgtgtttcaccacagacctttcgaaacaaaaagttgcttttctgatgtggtaagggaacggattgtcccagatttttttatgctccaaggactcggggcaaagaaactgttttatcattacgtgttattgaatcctaaagaattttcaggttgcatttctttccttttgcttgtgtttttccctggagcatttgcagacaccatacccttggtgtttattaaactcagagctctctctgggacccctcttctgtgcttcctgacgtttctctcatattttccacctccttatctttttgtcctaggaaatgtttggygccttgccttccatttcttgtattttttaaaaaaattttaccaatcatattcttaatttccaatgacgctcttgcctcttaaactgattttttccttttttatacagccttgtgttgggtaatctttgttttgcctgaggttcaacttctwcccgtctctgtcttgcgtctcctggacttcctccctggtgtttgctcaatgggaggcattagtgtaagtttacagggtgtgaagagaaggaggtgagtatactcattccctcctttatttgccagasgatagtaactgtgtccttctgcaactacatctcccaccagtcatcttggcctccgtgactgtggctgccagtggctttgagtaatgctgttttgcccttgtcctttcagcagttgtggtagtcatggcttcctcccgttgctagtctttggtgtcccggcatccctcattgttcctttgcactgctcatactttcattcacaactcttcatgtgaaccgtaaggcataaaattctattttctgatgaacaaacaacctgttcttaacttataggagcagtatgttcttgcatctctccaagaactggaacttatgtttgtaagttctcttctgacctgtgaattctgtctccgatgccagttgctctctataaactttattccttacattttataytgtggtcttcttaattctttcattcttttaaatgaaaatcttatttgattaaaataactattaagggtttcctctgctattgtgtaagcctgtttctacagtttccattgggtctcccttccatgagttccagtccactacagtccttctggacattccaaccaggtaaatattctttgtgtacccatctctaatgtttagacaaaagaaaaaaatggaattgtttgtttgatactaaaagtcttccagtatctggagctcagcttacatttctaattccttaatctcagcacactttggaactagacatcccttccgacatacctttctcagccctgtttttgcacctgtgtctatttgatacctactcatgtttcttactagcttgctatcaacctactcagccaagtccaacagtcgctttctttttcctttttattctgacccttattacttactgccttgcctcatgtctcactgtatgccttgtcttacctgccagaaggaaaactctttggagactgattttaaaaatgtttattcttcctttattctttactccacttttgcctatcatctctattcttgggcccataaagatgtgacaggcacaaacgatgttcccaacctcaagaagctcagagtcaactggagagacaagcatataaataaggggaacacagtgtgcaaagggctatgataaaacatggggggtggggggcaacaactaattctgtcaggaaggaggagggaagtctgggaaggctgggatcgtctgcactaaattttcttaccctggcaagcggaaggactgaaaggagatgagcagggagcactctataaatatgagtcgactgatggagctttgtttttaactcaggaatgaaggggtacagggacacactcaagccctttgtttcaaagtgttacgttggaccatgatgtagtcaatgtaaagatgtgtttacacaactttacaatcctgaagttgcagccattcccagcctgggattcttgagggattaggagggggctatagaatgcgtgagtgctccacaatatatccctttcagttggggctgaaggctcgtctaagctcgtagtgcctgcctcaactgtgccccatcaccaggtaccacactgatttaagctgatacagcaacagttggcattactctgagctatgctcacaatcatcaggaagagctaaggttaaaaaaaaaaaaaaggagttggagaaggagatacaaggatgctggggacaatttgtgagctaaattgcaggcttaagtggtttccactggagttgcttttcttgttcttcaagaaaaggcagaaagtgagaaagaagtcaggataaaaggagagggctcacagtgtcttgaaaagcttccaaactcctggctctttgtagctcccatagctgctgggatcatwgtttaaatcggaaagtagaacacaatagtcagaagtacataatactaaccagacgtggtggctcccgtctgtaatgccagcactttgggaggctgaggcgggtggatcgcttgaggtcaggagttcaagaccagcctggccaacatggtgaaatgctgtctctactaaaagtacaaaaattatccaggtgtggtggtgcttgcctgtaattccagctactcaggaggctgaggcaggataatcacttgaacctgggaggcagaggttatagtgagctgagatcacgtcactgcgccccagcctgggtgacagagcaagactccatctcgaaaaataaaaaaaaaaagtacacaagacataaatgaacgcagaatgaatgatcaccaatagcagactctttcgttttctctgtagaggaagaaatgtcagaatccaaatgatgacagtcatttgactcatcactctcacccagccttgaacggaggcagctgcgcttctctcccctttcctgagagcagcagggagctgcatgccttttttgtcttctcctgcttcttagagctgctctggatgctgcaggttcgttctcagttcaggaaggacatgtacggtttgttactgaggggacagaagtccacattgcaggctgttgggaagggatgaaagtcctctagaaagattttcacagcacttgagactctcctttctatacccactacagtttttagtttggagatccaagaggagaaagaatacaggaggaggggacatttgtgaggaaagcatctactttttagcagaaattcaaattctaaaggagatgggtgcttctgcagaagaarggatgtgtcagagggaaatggtctcaaatgtccctaggacaccctcagaggggacgtttgatcagggaaagtgcaatatcacacagttatggacagtgccccatgttgtcctcatgattgcattccatccaggccttgccacttctgagctctttgtgaatggttaaccttcctgaccccaggctttctagcaaaaagccaagcagttctggtgaagagtctaaactttggccttgggaagacctgggtgcaggtcctgagcctgccacttagtagctttgtaacttgggatattttgtaacttgggcctcagttttatcaagtgaaatatggaaataataggaactaccttgtagggacatcaagaggatgaaacgaaatgctgtatgttgagcatttagcagcatgttgcctcagtacagggaggttgttggtgattaaagaactctgcgagttgctgaccaactggtcccaggtctgctcccattacctctttcctttttccatctccccagccaacattaacccctgtgctaggctgtcaaaagaaatgatgtgatgaatctgaccctgtctcccatctaaagccttctatcctttccatcaatggaccatatatttttttgttttatattttaagactcaagatggcagaagttgtgtagggagtaggaaaagaaaccacagggtgtggtttgcactgagaatactgatggaattcacattggataccaggatgatctgtagatagagtgtgtgtgtgtctgtgtgtgtatgcatgtatgtgcatttgtgtgatctttctgaaaatattggctgtggatttttagccattatgttatcaacagtctctttttttcctatcttatttgtaaacatgcctaggggctaggatgtgatggacatattctataaacacaataaatattataaaacagagtgaatctaacctacacatgctcagcttggagtaattaaaaagaaagaattatatatatgaacattcaaatatttagaaggaattataaatatatgtgtgtatgagtgtgtgtgtgtctgtgtgtgtatatgcatgcacagagaagaatatcagtttcaaagcagtctgtactgccttgatattggagatattgcatcaactttctgcccaaatactaattgttaatttggttgattaggtcttgatgggtaatcytgtggtgctggtttcaagtgaccataatttagaatctattgactctaagtttcttcaagtaatgcctgttaaatcttcccccccaaaaaaaagaaagaaagaaaaccttgggaaacactaccttgatccaagccgtcattttataaataaaaagcaatgaccaaagmaatgattttcctgagtttattgaatggtgaatctcatattctattcctgtgccataaataaaacataattatcttgtacttgaaggaagatgctatggaaagagaattcttcctctgatggacttcacctaatagcttttgttaccttgcttttggatctgttctgcattttgtttttcaaagaacactctttccagagagggtgcttaatagtattgcttattgtgtaaccatgtagctctattgtaatgataattgtatttcttttgaatccaaaagtttctctattccctctaaagcctgcctttatttgcaccctcctgactctacacttagagaaatgcccgacttttgttcttcatcttgaacataccccaggtgacctgtstggggacacactttttgctcccagagcgtatgcaaattcctgtttactgtaaaaytttctcaaattctcctcagaagcctaaagayttctgtataatctactcctgtaaaagaaaattaattgatmttaattaatctttttcccctggatggcaattttttttcttgatctcagtgttggtaatacgtcattcattgttcttttttttttttttttttttttttttttgcgatggagtcttgccctgttgcccaggctggagtgcagtgatgcaatctcagctcactgccacctctgcttaccaggttcaagtgattctcctgcctcagtctcccgagtagctgggattacaggcgcacaccaccaagcctggctaatttttgtatttttagtagagacggggagatgggatgtcaccgtgttggccaggctggtctcgaacacctgacctcatgtgatctacctgcctcggcctcccaaagtgctgggattacaggtgagagccactgtgcccagcctcyattcagtgttcctaataacagcttgtggytgtgccatttatttagtggagttattaagtaccccaagctttgctcttacartgtcccttatagagtaaaattgcaggtcttgcttgccagtcttctgagagctacartggcccctaagtgttctgggaactttggaactagtgcactatttttttttcatttttgtgttgacagtagtggatgtgaatttgctttggttcagtccaacaaatatttgtcaacactgtgccataacatgcgctaggctcttgagatagttttttttttttttttttaattttttaatgtactaagtattgtttctgccttcaaagaactcttgccctggtgaaggtgaccaacttctgaagtatatgactctgggtgataattgctgtrttatgccaaacgcagagctttaagaagcatcaaactgtgacttcagtgggaaaagatttcacaaaggggtggcacttcagtggcatcctgtaaggctaaccaggagctttttagaaggccaagaagcttggtaatgtcttgaaatgtgttagataagttacaggttcttatctcctcctgatccctttcctacctcaacactcttattcccaacttatacatactctcagaggatgctgtgcctggagatgtattaccaacgagtaaaaaaattgctattttagtcccgattataaaagttgcagtgtaattctttaaatagtctttcccattaaattcgtcctcartatgattattstcaccaccacttctgtgcttatgttatcataggacagtctctctgctgaacatctcctctttctttatttctgtgtttattttccctgaaactctgacagtgattccagtgcagcatggcttcccaaacatatctgtgcaatggaattacctggggagcttcgcaaactactgatgtctgtgtcccaccgccatagactgtgatataattgatttgtggcatagtctgggctttggaatttttaaagatccctaggcagtgatgaaaacattctagaattgattgtagtaatgattgtaccactgggtaaatagattaaaaaccattgaattgtatcatttgggtgaattacatcaatgggtgaattgyatgatatgtgaattacatctcaataaagcagctatatatgaggcaggagaatcacttgaacctgkgaggcgaaggttgcagtgagccgagattgtgccgttgcactccagcctgggtgacaatagcaaaactctgtctaaaaaaaaaaaaaaaaaatatatatatatatatakatatrtatatatatatatatatagtattaataaataaatatctctaaatatgaggtgactaatttgggaagtactgccattgagtataaatggggaaactgagatgtaggggagggacttgcccaaagtctcctagctagccagatggaataagaacccaggcgttctgacactagagcttacgttctcctctactatatcgtcctgstgtcttcaaacatgaaggtgatcctgctaactcattactcagtaggcatatgcttggagtagtagtgatggatttccttacatctattcacatgtcatactatgtaagcagtggatctaatttgcaaaataattggctttagaataagataaaggagttagcctctttgggaataaaatctcagttctcaatcactttatcacagtactgaaataaaccacgccagtstcctttggtggccaggaggtatccttagaagtacawttaaagaggaaaatgctggtatcaaagttataaattcaaaaccaactgttctacatcctggaatctgaaaatagatttctattttaaagatactgcctgaaatgttaccttggtctatgtcaaacctttactgaatttgggtataaaacatacataaaaacacttaaactgtaataggaaaatgtttgggtttcagccacagacaggcaataaggcaagcccagagttggaaggcctgttttcatcagccttagaagacataaaatggaaaatatttttgaaaggaaaaaaaaaaaaaagaatctctagcataatgaattgtcataaatgtgttttcttgaaaaaatattcaaagtttaagtccccaaaatggtatggtgacttttccaagaggaatgctttgtctcttataagtaaagatgatcactgctgacctcttcataccttctacctctttaagtatgtgctcctgttaaaaataaagatcgarttcaaaaagatgagcttgactaagagctgaaagggaattcattaaaaatggccttttaaaatgcctaaaggttgagttccagtggtaggtttagttcattttgctttagtagttaggtggcaactgtttctcaaagtgttgggaagtctagmagttttcttttctttttttttaatttttattatactttaagtttcagggtacatgtgcagaatgtacaggttagttacatatgtatacatgtgccatgttggtgtgctgcacccatcaactcgtgatttaacattaggtatatctcctaatgctatccctcccccctccctccaccccacaacaggccctggtgtgtgatgttccccttcctgtgtccatgtgttctcattgttcaattcccacctatgagtgagaacacgcggtatttggttttttgtccttgtgatagtttgctgagaatgatggtttccagcttcatccatgtccctataaaggatatgaactcatcattttttatggctgcatagtattccatggtgtatgtgtgccacattttgttaatccagtctatcattgttggacatgtgggtcagttccaagtctttgctattgtgagtagtgccgcaataaacatgtgtgtgcatgtgtctttatagcagcatgatttataatcctttgggtatatactcagtaatgggattgctgggccaaatggcatttctagttcaagatccctgaggaattgccacactgacttccacaatggttgaactagtttacagtcccaccaacactgtaaagtgttcctatttctccacatcctctccagcacctgttgtttcctgactttttaatgattgccattctaactggtgagagatggtatctcattgcggatttgttttgcatttctctgatggccagtgatgatgagygtttttttcacgtgtcttttggctgcataaatgtcttcttttgagaagtgtctgttcatatccttcacccactttttgctgggastgtttgtttttttcttgtagatttgtttgagttcattgtagattctggatattagccctttgtcagatgggtagactgcaaaaattttctcccattctgtaggtggcctgttcactctgatggtagtttcttttgctgtgcagaagctctttagtttaattagatcccatttgtcaattttggctttkgttgccattgcttttagtgttttggacatgaagtccttgcccatacttatgtcctgaatggtattgcctaggttttcttctagggtttttatggttttaggtctaacatttaagtctttaatccatcttgaattaatttttgtataaggtgtaaggaagggatccagtttcagctttctatatatggctaaccagttttcccagcaccatttattaaatagagaatcctttccccgttycttttgtcaggtttgtcaaagatcagatggttgtagatatgyggcattatttctgagggctctgttctgttccattgatctatatctctgttttggtaccagtaccatgctgttttggttactgtagccttgtagtatagttcgaagtcaggtagygtgatgcctccagctttgttcttttggcttaggattgacttggcagtgtgggctcttttttggttccmtaagaactttaaagtagttttttccaattctgtgaagaaagtaattggtagcttgatggggatggcattgaatctataaattaccttgggcagtatggccattttcacgatattgattcttcctacccatgagcatggaatgttcttccatttgtttgtatcctcttttatttcwttgagcagtggtttgtagttctccttgaagaggtccttcacatcccttgtaagttggattcctaggtattttattctctttgaagcaattgtgaatgggagttcactcatgatttggctctctgtttgtctgttgttggtgtataagaatgcttgtgatttttgcacattgattttgtatcttgagactttgctgaagttgcctatcagcttaaggagattttgggctgagacaatggggttttctagatatacaatcatgtcatctgcaaacagggacaatttgacttcctcttttcttaactgaatgccctttatttccttctcctgcctgattgccctggccagarcttccaacactatgttgaataggagtggtgagagagggcatccctgtcttgtgccagttttcaaagggaatgcttccagtttttgcccattcagtataatattggctgttggttggtcatagatagctcttattattttgagatacgtctcatcaatacctcatttattgagagtttttagcatgaagcrttgttgaattttgtcaaaggccttttctgcrtctattgagataatcatgtggtttttgtcgttggttctgtttatatgctggattacgtttattgatttgcgtatgttgaaccagccttgcatcccagggatgaaacccacttgatcatctacagaactctcaaccccaaatcaacagaatatacattcttctcagcaccgcaccgcactgattccaaaattgaccacttagttggaagtaaagcactcctcagcaaatgtaaaagaacagaaattaaaacaaactctcagaccacagggcaatcaaactagaattcaggattaagaaactcactcaaaaccactcaactacatggaaactgaacaacgtgctcctgaatgactactgggtacataaaaaaatgaaggcagaaataaagatgttctttgaaaccaatgagaacaaagacacaacataccagaatctctgggacacattcaaagcagtgtgtagagggaaatttatagcactaaatgccsataagagaaagcaggaaagatctaaaattgacaccctaacatcacaattaaaagaactagagaagcaagagcaaacacattcaaaagctagcagaaggcaagaaataactaagatcagagcggaactgaaggaaatagagacacaaaaaacccttcaaaaaatcagtgaatccaggagctggttttttgaaaagtctagcagttttcaatctgtctcttattgccaatcacaaacttttrcgagagcaagttatcttggatattcagatttttaaaagtggtcttttatctatttgcttgaartatttttctgagtattcaytttgttgtgtaactaatttcccttttttgtaaatgaaatccattgctctcatatttttaaaggaataacaggcatctattagaatccaacggtgaagaatagaagtgggaactaggtgttatagcattctccattaacggaaagtgttgtattgtttatgaattcttgtattttgtatttgggatcagcccagcaaggggtcagccatagtgcttgggggcagcatgggtagtatgcccacctccatgcctcgtaggggtacagccatacctcaaagatattatgggttcagatacacaccactgtgaaaaagtgactatcgcaataaatcagtcatgtgaattttagtttcccaatgcatatacaagctatatttacacttagctgtagtctattaagtatgcaatatyattattcctaaaaagtgtacataccttaattaaaaatactttattgctaaaaaatgtgaacaataaaaatgggaaggtcttgcctcaatgttgatggctgctgactgatcatggtggtggttgctgaaagttgggtggttgtggcgatttcttacaataaaaatgaagtttgccatactgattgattcttcctttaatgaaaggtttctctgtagaatgtaatgctatttaatagcattttactcatagtagaacttattttaaaattagagttaatcgtctttgacagtgctgttgttttatcaaccaagttggtataatggtccaaattctttgttgtcatttcracaatgttcacatcatcttcactaggagttgatttcatctcaagaaatcactttctttgctcacccataaaaagcaatttctcatctgttcaagtttgatcatgagattacagcaatacagtcacgtctycaggctttacttctaattctagttttcctgcttttttcaccactgatgtcttgaacccctcaaagtcatccatgagggctggaatcaacttcttctaaactatgttcatgttgacctcccatgcattatgaatgttcttaatggcttctagaatggtgaatcctttccaggttttcaatttactttgcccagatccatcagaggagtcactgtccatgacagttayagccttacaaaatgtatttaattaataagacttgaaagtcagaattcctccttgatctgtgggctgcagaatagatattgtattagcaagtgtgaaaacaacattcatctccttgtacatctctatcagagcccttgggtgaccaggtacatcatcagtaagcagtaatatttggaaaagaatgttttttcctgagcagtaggtctcaagagggggcttaaaaaattcagtaaatcatgcaacagacagatgtgctgtcatcccggctttgttgttccatttacagagcacaggcagagttgatgtagtatcattcttaagggatccaggattttcagaatgctcaaggaccactgacttcaacttaaagtcaccatctgcagtagcccctaacaagagattcagyttgttcattgaagctttgaagccaggcactaacttctcctctctagctaggacagtccttgatggcatcgccttccaatagaaggctgttttgtcactatckaaaatctattgtttaatatggtcaacttcattgattatctttgccagctcttctggaaaacttgctgcagcttctgtattagcacttgctgcttcacctygacattttatattatggaaatggcttctttccttgaacctcatgaccaatctctgctagcttcagacttgttttctgtagcttcctcacctctctcagacttcatasaattggagasagttaggaccttgctctggattaggctttggcttaagggaatgttgtggctkgtttgatcttctatcyagaccactcaaactctccctatcagcaataagtgttttactttcttamtgtttgtgtgttcactggagtagcacttttaatttccttcaataacttgtcctttgcattcacagcktggctgtttggcccaagaggcctagcttttggcctgtctttggcttctggcatgccttctttactaagctttatcgtttctactttttgatttaaagtgagagatgtgtgacacttcctttcacttgaacacttaaaaggcgattgtagggttattagttggtctaaaaatgcaatatctgagaagcacagtaaagcaaaatgcagtgaaatgaagtatgcctgcactgactggttctttgaccatcctctttcctaactgctgccccacatttctattcatcagtaagtattattagctcttctcccaagacatatccagaataagtgcactgctgcctcascaactcaagtccctaccgcttcccatcgggctcgcctttgtagcttcttaactgtgtggtttctccatgcttgcttggctattgtccactctctctgcagcacccagagtcactgctccaaagtttcamgtagaacatattacttctcccttgcctaaaaacttccaaaggctagccattttatagggataaaatttaaatggcttgcrtttatttctgttgatttcactcataattcagcctggcccatatcagggctttgtacttgttcttccctttatttagaggatcttgaggacctccaataaatagcagccctygtctatgcctgggtcctcaaatttctcaaatgaattccaaaataaacaaaggaatgactgatagaggccaggcttggtggacatgactttaggtcttactcaaggtggctagctccagggcttctcaaagtcttaatacacatatgaattacctaggggtcaggtcaagtgcagattttgatcaattacatctggagtggagctgagaatttgcattcctaacaagctcttgggtgatgctgatgctggtattccccagaccacacattgaatattaaggtgctggctggtattataccctccaagtaggccaactaacttattttcctaataatagtcagtgtcagactcctcttaaaacctaggagtggggaaaagctggccaccctgacaaacacccttcctggattgctggcttcatttaccagtctcaagtgagacttttcttcttggagacgccacctggccaatttatctcaaacaacagtcctgctgccactccatcactcactctcaatggcattatcccaatgtatgtttttccagctctcctaactatctgaaaatgttactaactcatttagtcttttccccctggatcagagaatagagactgtctgttttgttcactgctgtctttccgtaaccataaaagggcagtgtttaatgtatgtagttgttaaataaagtaatatagattaattataagacagataaataatgagctccatgataagacattttctttttctcattaaccgttgtatccctagcatmtaacacagggtctggcacatagtagatgwtgaataaatgaatgagaactcaaacatagggaaagcatgttttcgggtaataamtagtggatcaagttaactggaaagcataactttacctaggaagagtcagaattatcyttctctctctctctctctstttctctctttctctttttctttctctctttctctctcttttctytttttttcttttctttcattttccagattcccakagtctgggcaataaaaaagagagaatgttttgatattaagaatggtgcctgactagttactaaaaggccttttaaaaaagargctgccaaagcctgtaccatttggtaggaagctgttgtctactgacacatctaagcatagtcacagacattcctgagaatgagccgtcagtccttctatctctggctcccatttctatttgaatggtgtcagaactacaaagctcagtcactgagttgccttttcaagtcatcctggataatggcctgaactttttcttcatttctgtgagaagaattgggctattcacctgtcccctgcccagatgactattgcagattggttcattttgacatccttgattgaggtgttttttttttctccccatcatctgaggctgggaaaaaaatggctcaaacattctttgactagctcttattctatcaatagcgacttgtaaggactccacttctataacttggttgtaactggcttaatgagagaagaaatgacctgaaatttgttgagtgtgtcttggggtccaggtgctttggaagaatagctgtctaagagcttgaccttgagtattgactttgttctttgtttccaaaatgggtttggcccacatttcagtcctaccttagcgtctatctgattggtaatttgatgtgtaatttctacacatatgtcagtactttaggacattctgctgttttggtttggtttggtgtacaacagtaggctyttctaagatacattaaaaaaatcttaaatactagagatagagacatggraaagtgcaatgaatgaatccatttrttcattcagctgatgttkgttgggtatcaattatttgcctggcactttgctcactgctgtgtatatggggatggtaaatgaaaatattatcttattcttttcacaggaagggacttttctctttagtccctggctctgtgtcccttcctactcmcttcctccccacctctccttsasacacacacacacwcwcwcwctctctctststgtgtgtgtgtgtgtgtgtgtgtgtgtgtgtgtgtgtgkctccttacatcagtagaaatggcaactgccttgcctggtgacaacatgccagtggaggaaaactcacctaaaagtaaaggaccggctctattctgtcctctttctgtggtacctgcttgtggttgtgaacagtctgcccatcagtctccatatggcaagcaggccagataaggcctgcctggttcttcccatttccattttcaacctcaaacagaaagaggagatcaggatagtatgtcactgcagacctggggtgagggaacaggaagatccattttggttttggcctgaaccaagccgtttaaaatttacttacagaatttccaggcactactgggaactgcctagtagccattcatgaagctgttcttgcctaccacctggctgcttaggtctgcttgggagggggctgataggcaatcccaatctctgaccgtattcccagcccttaaggagatcattatctaatatgtaagacagagaggcaaatgcataattactgtgcctatgagaagccctgtactaggagtgtgtcccaggcactgtaaataatacaagacaggcacttctatatggtatactaattagttaacaccacattcttctgcagcagattgtatcactgatagccatgataagggaagaaaattgcccccaaatggaacctacaattgtctgtgtactgtcttgtttgtgtacttagaaactgtgcacagtttccccatcagagcataccatgttacagtttaattttggtattagctatgatctgaagctgttgggagctgtcattcttaaacatctgtacttgacttgtttaaacttagggctctggcctttccccarcagcctggcatgccaggaaaagtaaagawaagacctcatgccattaaatagacaggtggtttccatggccaccaacacaggaagactycaacatcttagcaataagctgaagcagttaaaggggagtttgagaaacaatcagatttgtttaacagtgtgtgggatggcttcataagaaatggtgtaagtgcccgtaagagggacatgctttttctcatcttctakagctgggaggttaaacaggagcccagagatacataygctttccatcttctcagtgggttartgggaaaagtgaaakggatattagcaagcgcttggttagtragagacctcttgtggggcagtttttgaggatcagaacattatactgtgcattgtcctctaaagtgagagagagcacaccagcaatttgagtggaaacatcaataaagaaataataaaaaccttattaaatgagaaagtgctggaaaagtgcatcaaggcaagaggggacatctcagcagcagtaacttgagaaaatatctttagggaatttagctgtaactgagagtgcgtgccacagcaaatgcatgcttcacttgttctctgtgacactgacacatcttttgtgatcttttctaaatgcaccctcaaaatgggttaatgttttcttgytttgtgctgaattttatagaaatgcatgcctctagggaaattttaattgtctccttatttattttgtcttatattaattccccatacagttgaaaattaatactgctgtggatttacacaatttgctaattagtaagaagcttgccatttactaacacaaawctatgaataaacccgctaatttaaaaattatatcacaatcagaatgttcccatggaagttggaagctcagagaaaaatgcggtctttagatatttattaacaaggtgatcagtcagaggattaccgtagaatatrttatttcaatgctagaagtttgttattcatgctcctaattgaaagagtcaagattctggaagatacacgtattatcacatccttagcttgaaatggatsgaaccatctcagggctgccatgaaaagtttccctgggtcattagtctaaagccgaaaagtgaaatgagcaataggttttccatgttatgcagcaactctgattgattggtaatggtatctaaaagattctgttaatgccctgcaggagaacatgtcakagttaattagcgacatctgcctacagtgcaggaggaagatgccacaacatgagtgctaggcctgggcccttcctggtatagaagaccccaggcagtgagcttaccaagcaacttttacttttttgactggaggtcggagctcctgggaatgtgcatttagtggggaaaaatgttctttctggactgtgcaagaggagaagtaaataatgccatcctagaactccaaagaccatgctgagtcattagactcaggggtcaagtggacaggccaatggcatactcaaactctcctgagctccctatatgactctgcctcatctgcttggcttggttcacccatgacatcagagaaatatttaagttgggagcaaccctacttcaggcatgtgctgttactaagggtaattgatgcttgaaaccctggcctgagccatggaatggtttcatgtggccctgtgtgtatgccagtcagggacatgggtcagggagatgactagagattggttgacattatgcttccctgttagagaacaaaggtagggcagggtctagcacacacctctgtcttctgagcccygcttccatgagctgtttctaacaggctttgcgatasacaaaggcaaagacgacacaggtagcagtcaagtgatgccaacacaactctgtcccggcaggactcttggcgtaggggtcttctaaacaagatcacttgaaacggatcaaaattttccaagagaagcgttttttaaaaaattctatttgttgcctcttttggaaagcaatggtccttcctcatttttgcaatgaaaccagggtgcaaatgtatgggttactaatagctggcatttgaaatagtattttaaaagcaaaagcctttaagattacagagctcagagattctgcactgggagaacacacatcattgttttacttggactcaaaatgcatttttcaacaatacctatgcatttcattagtgattgcttatcagtcttttaattattatgttgtgcttctcagcccacgtggcaatgagagttgccataaattacccttagtaactggcatatgcttgaagtagcattgctcccaactttgtttctctgatgtcatgggtgaaccaagcaagcagatgaggcagagccatgtagagagctaaggagagcctgggtacacccttggcctgtctgcttgaccccgagagacctggcatggccaccttatggactctgagtaatctctttatacctatggaaaaccaaasagacagactctgtgggtagcagtgattgtgcacttgaaaattaattcctttcttgacatcatgtctatttttttttttgttcttcctgtcacctcctccgctcacccaccaggatgtagacatttggaatgatcatttacatgaaaaaagtacagcacataatgcaatgtgggcagaagatctttcttagcactgttggaggtggggaggagaccagtgtcacatacctgggtacaaatctcggctccatcacttgcttccgtgtgtacttgggcaagggacttaaactcttagtgttttcttttgtaaaattagggtgataaaaatacctcagaggctttggagaggagtaagtgagatatttacataaagcatttatagcataatgtctggtatatagcaagggctacaggaatattagctcttattagtatggttaacaaatgccaattttaaatgttactgcacaagttttctaacggaatggtctctccttcatgggtatcatcaggagatgtccttggtggcatcatatgtaaacgttgacctccaagtcctgttttcagaaatgacttctcttagctgtataaaaatgtgaaaaaaagagarcatcctttgccctgagcacagtattycctagacagtgttsaacacggtggtcmccytggatagaaggcagcagctacaggrgacaaaggcagcgttacacacctaggtgatgccactgctcctcttctctaccaccarcctctattaccttcagggtgttgctattccaaaacccaccccaggccctcattttgcctaaccgttttytgagcggtgttgggtgaccacttgtactgagaagagctttggggttttcactaatgggtgaccttgatcaagttgsttgacttctgtgggttttgttttcctccaggtctactgtacaggctattggggtttaaatgagcaaatgcaggtcaagtgcctaatgtaggctgggcatttagaagtattcaaccaatgctcatttgtcctcattggtgcaaggctcttgttgctgtgaaaggatatgaagmcaaggaagagatggattttggatcagttgcatcttccctcgttaactatataaagacatgtttgtcatagtttcagagggaccagctccttcttaatcctttacctttctgtctcctctgcatctgggtctgtctttggtgctcagaaaactttatagatgtcacttaacatttgtctagcctcttttgtgttgaggcagtatgctgaytactgcgggagtgtcaaggaaggtctgtatatagacggatcacccagatggctgtgagagactcactgttcattccaggtcaggaggagatcaaaagtagctataagaaaatgaccaattagtgttccctttgagaactcttagctccaggaagtccttatacaagtgaaaaggaggacaaggcagaaataaacattaagtgttattataaggaaggcaatagccagtatgtaaatgagcatgaccacacaggaaagctgttttgagtcagtgtgaatcataagaccaaagtgaatggataatagccaccctgcaaactccagctctcctgcagaaagcttgcctgcagacagaaatgtcccacctggcctgaacaatggaaccacgtgatggaattcaggtgccggtctcagtctgctagcttgttagtgttggatgatgctccccagtaggcagccagagcctcattactgttggtaacagtaagctaataattaagagttctgaaattccaaatggtgacaaatagagtgaagaggtaatgagatgggtaggattagagatcccctgatgagtgcctctcatggcgagaggatgaagaaatgaaaaaacgatgaagagaaaactgccattgtcattctaagagctgctgagaaataccaatttgtctagggtgcagggaaatgggaaagcatttgtcaagcaatgaaaaagcaaaattaccttgaatggagccctggataatgctgttctgtaaaacccatgatggtggaagaagagtcaagacttgattcatttaaattcrtcttttatttaatgttgtataataggcatctctgctgaagttgggaagctctatttcaagactccatgagcaagaacctctcagctacagtaaagtctggccatactggctttagtggggacataacacagaggctatagtttgactttttatgatttcctttaaccgacatcttctgagggcctggaagaacacagggaatcagtagtttgggacggctttggattcaaggccttgaatttatatctggttatcttcaaatgtgttttccatatgctaataaacaggattgaaggaagatgtgcattatatacttctaaacttgttctcttacaaggttgtaccacctgtagtacactgttacgtaaaaaatgtatcagtcatgtagttaycttgtgaataacaccgttagatattagaagaatatggtagaccacttaaaataggagtaagtctatagagtacaaatgayacatagctataattgacactgtaattagccttatactccgttttagcaaaaacctatgagcagcattgctttgccawgaatattgccaacaattcaggagtcaaaaaatggtggaataatttctctcatatgcagaatagtaattattatgttgtattcacttatgttgggaactttaatttgttcaatgtaaatgttcaaaatataatttatgtggtttttcctttggtatttcttttggtatttatttttaaaataatatgtgagaagtgttaaagtaaaagacccaatgtttcttaacctctgactggccttgctctgataaagggatgctacaggaacccctttggaagctcctgcttctgaaagatcacagttgattcagatttaccatacaagcttttgacattatttctgagttgatgtcccaatatgtccacaatgtcttcatacagtccatggagatgaatatctgtgatatctgtggattttttgatggtatagagactataatatagtagaaattttgattactccagaaagatacataacagtaaggtgattttcaacttctrattctcctctttaaggattgtttttgtatttaaacatgtaagttcgtctctgctattacagtccacatgaaaaacatgatttgggtttcgttttgtttgttctttttttttttttaaccgttaagatgaatctcagaatgaaaaaaacgaatctcggcctccatcagactgagaagtcatgccatactttgtccttcagtgtagaaatctgtttcctttttattcaggtttctgtctttccctgatacgttttttttctttttttgagatgaagtcttgctttgttacccaggctggagtgcagtggcgcagcacaatcttggctcactgcaacctctgcccactgggttcaagcgattctcctgcctcagcctcccaagtagctgggattacaggtgcccaccaccatgcccagctaattttctgtatttttagtagagacagggttttgcagtgttggccaggctggtctcaaactcctgacctcaagtgatctgccctcctaggcctcctaaagtgctgggattacaggtgtgagccactgtgcttggcttttccctgatattttgtacaaacacaaagctctasgccttgatgctggtgttttagatattcatcacctgtgtttggtttggaagaatcattttataaagtgacaaaagtagttctaaatgttatacatttttgtaaatatgataccatgtttaatactcaaggtcaggttgaagcataaaacatagaagtatccatttacaccctatatctttcttgactagatgagaagaacttcaggagcctctctctctctctctctctctctcctctctctctctctctatatatatatatawtttttaaatatatataatttttatatataaaataaatataaaatatatatatatatatattttaaagcagtgacctctttttgcataaaaggtcyccgtcggatcaatcagtggaagaagggggttgctgattcacattacgtaaaaacacaagtcctcacttgagtcataggtaggtttcttagaaactacaactttaaccaaaacaatgtataatgaaaccaatttgaccataggctaactgattaaaaaaaaaattcctgtggcatatttctcctcacaaaaacatcaccaaacttctaaataaaaaccaaaatattgttaatattaaatacagaaataaagatgatgtctacatattataagaaakattaataaaagcaagataattatttacccattcattgcagttcagggtctcaggtggccagagcctgtcttggcagctcagggcccaagggaggagcccaccctggacagggcgccattccctytcaggactcactytacatacyttctcactcagaccgggaccatgtagacatgcctyttaatctcacatgcacctttggaatgagggaggaaaccagagtgcctggagraaacccatccagacatgcagataaccatgaagatttcacacagacactggccccactcagaaataaatgagactgttaaaagtataagactgtatcttccttaattatctttccttctctcactggatgagtcagctacaaagcagatgtcattgagagtgctgggggcaccaagtaacatgtctaaagagctctggagcagaagagggagtaggtatgaatacttatcaggaagagggagtaggtataaatacttaccaagttggcaatgaacaggctggagtaagggcttcttggccttcactatacgttaggaatagaatcaccataggaactttcaaaataaaaaccraaaaaaagcctgatatctaggtctcagccagaccaattaatttaaaatatctgggagtggggtgttggtgaggaatgtggaggacttggaaccctctttcattggtggtggtaatgtaaaatggtacagccactaaggaaaacagcttggcagttccttaaaatgttaaatacagagttcccacatgatccagcagtttcactcttaggtgtacgttcaataattgaaaacataagtccacacaaaacttgcacctgaatattcacagcactattcacaaaygtccaaaaatgtagtaacaaatgtccatcaactgatgaatggagaaaaacatgtggtgtatacatacaatggggtattattcagcctttaaaaggaataaaggatgaatacatggtaaaatgtggatgaatcttgaacacatgctaagtgaaataagctacacataaaaggctatatatcgtatgactccatttctatagaatgtccagaaaaggcaaatccacagagacagaaagtagaatartagttgccaggggctgtgggctagaggaaaatgtgaaatgactgctaaaggaaatggtttctcttttgggggtaaaaatgttctgaattaggtagttatgataattgtacaattttgcacacataytgaaaaccatcaaactgtacactagaagggtgaattttatggtatatgaattgtatgtcacttttcaaaagtcttaacagaaaaataatctgggaatggggcatatgcttttttttaagctcctgaggtttatttttatagacaggatctcactatgtcacccaggctagagtgcaggggcatgatcacagctcactgcagcatcaacttcccaggctcaggcatttcgtgccatggtctctggagtagctgggactataggtgcatgccaccacacccagctaatttcttcctctcctctcctctctcctcccctcctcccccctcctcccccctcccgtctcccctcccctccccccctcccgtctcacctcttccccctccccctcccgtctcccctcccctctcccctaccctctctctgtttctctctttctttctttctttctttctcactatatttcccaggctggtcttgaagtcctgttcttaagggatccttctgctttggtctcccaaatgagaggtattagccaccacaccaggcgtcctgagatgatttttaatgtacaatagtaaaatctttttttgaaagtcaaatttagaccctgaacactctggagcttgaatctttgwtatcacgagtttctcattaagtgaaacgccacacaagaccttgtatgatctgatccctgctcatctttcaaacccatctcctcacctctgccttgctgcctgctgttaggctccaccccacactcttctttccattcctctaagatcttgagatcattcttgccttggcaattgctgtttcctccatctggaacattttatccccatatagtcacatacagtrgacttcttatcattcaactcgcagatcaaacgtgagattcccctttcctttgacacttaggcagccacttctgcctcctccaagtcccttcctgttcttgsattttgatcatttccttcaagtcacaatcagaatatttttccttgttgactggcttgtagtctctactgcttgcaataygcaccctgtgcctagaatactacatgagagcagagggytggtctgtcatatttaccactagaatagtatttggaatatggcaagtatataatacatatttattaaatgaataggtgattagagtttgatgaggaaaggttattaagtatatgtaatccctgaacatcttkttaggagacagggaagaaactggtgagaatgaggttaaatatgtaaaacaagtaggtttacaaaaaaaaaaaaatgacagaacagagaagaggtaactgatgaagtgagatcttgaaaaggcagttggcattttgaaatacctaggtgttttctgtttataaatagctgaggttttggattttctttgacttgttaacaattgaaaatttttttagtgacataagttgatgacttaatatacttcactaaaaaattctctttktataaaaatgttacaggtattcttgtttgcttaaattctgggacacttcaagttgtcttctctttctctttgttcactttgttatcttcttctaggatcctcttctactgtctcctgtggaattttgacatacgcctgtagattagaatgttttayaaatcatataaacttcaatatatgtctccaaccattcatttatgtgccttgttttccaagtcatcaataaagtatgtttcagagcggggccagatcagattgtgttgttcctcagttagatgacagggcattgttcctctcaaggttcatcttgggatccattagccagcagcttttaataagctcatttacattcttggttaacaattgagcccctagtgtttaagttaattgaaatagaaacctactctccagttggtagaagtgtmtggagttaaggctttttctgacatcccccaaagacattcgtgccttctaggattggtctagatttttgccattcactgagtaatgccagggtataaaaatagcagattattttttacagtgaaccttaatattcctggccataatgaaataacaactttatttttctagttaaaaggaaacacagttttattcttttaacgaagagaacagtgtttctttttcattgtgtctgacttcctggttgcctaggagacattaattttcatggtagattgttttatctaggacatttagaagaagttatttccctttatgttgtattcctaagtcatgacaaatttttattagcaatttggagaattagagaatgcctggcattaacaaagttttggggaaatgggacttttttctatacaaccgttggatatcaactattggctacatttcttgagagctatttagtagttcatacccgtagccttaatagttcaatatactttgaacacagtgattctcaaatctaggaattaatgcatgagaagtaatcaaagagatgcataaatgttgatatgttggtgtatgaaggaccttcctcatagggttgtcaggattaagtaacatatcatataaattgcttagaaagatgaaagtaccgagtaagtacttagctgttatttctattatttaatcagatggtagtttttgacactgctctacctctaatatggagagatagtagtcacctaatggcagtatggtgtcaaatacatgattttatttgtatttatgtaaccattacataccatttttgtgataagcattatacgaagcaacttaacaatrttagcttatgtatgagttgacaattaacaattgtttattgaataaaattaggcattacttttgtcaaggcaaaatacaccaatattgtgactagcacttatcaaatatttaagtgctttatgtgtgtccttgagaagaaggtactgttgtcatactcatttctcaaatttaaagaagctaaggaacttgcctgagttcataaaatgaattggaaagaagatacaatcggaagccatgtttgtcaaatccccgtgatgggttagctacattgttgcagagattgttggagtcaagagtatgatgaagtataggaatttgttttttgagaaagttctcaagttgatcttaatagacctagttttaaaactagtgctctgagatgtgcttttcaaacgttaatgtacaawcagcctagctggggatcttgttaaaatacaggtttatgcattacatctaggctggggcctgggaatctacatttcttacaactctcaagtgmtgctgttgttgctacttagaggaccacattttgagtagccaggcaagggaaatatgcgctctttttcttccaaaaacatcatttgctacagaaaagagagagaaatcatgaaatgggatggaaatgttttcaggtaatctgttgattagaatttcacatcttcatgagcttggtttcttaggtgcatttgctgaaggcctgagtttcttaaacttcggccagtgggttttgaaggccctcrtgctctcaaaaagtttgtatttattgttctctatttgatgaaataatatgaaaatgacagatataggcttatattttaaatcagctgcttgtygtctgataacagagtactgctatgtggctttagtgcaaagggattgcctaaagtgacagagttgttattaattcagtatttcccaaatcagggccctgaagtcttatattcccaagtttaagaaatccttgaataatattctctatgaagagtgtctctctctctctctctctctcgctctctctctctcgtgctcctttttttctgcctgctttatatccactgccagctgattagattgtgcccaccagattaagggtggatcttccttccccagcccactgactcaaatgtgaatctcttttggcaataccaaaagagatttcgttactttagttggatgttaacataacatttgaaagcaaatccggaaaaagaatctgccctaccctgaagtgagctattgtcagytcctgttcacagcttggagatttcccagtttggggcctgcatttgctttygtgtcactgaaccttactctactacaagttaggttgcctatctagccctgtcaaaaaaatgactgaacacatccactgagtcacacacaaaaggatagtagagatcttttcattgtttcttttatgtttattaaattttaaagataaagctctaaaagtgttatgctaccagctggcgagaattgtaggagatgcagatgtaaaggtagtttataggaggtagagagggtacaaatatgtcataagagagaggtagcaagaggctaccttttatggctgaaaagtgggaaatggagactcatttaagaatgttgaaatcatatatttttagtcccaaataaaagaagttttcaccaaaaaaataaagaagaaagtaatcggctagaaatgtgagaccttttttttcatttatgtatctacttctgtttgtttataaagagagagtagggttcaattaccatttctagagtaaaccaagttccttgtatttccttcttggctaatgctcactacaagtctaagggtctaaaccttggactgaggttcctaatccagtatttgcttctctggcttacagaarccaccatctccatatttgctaagaagcagttccctgaagatgattttccctggaaaattccacagaatattggtacatctagtctttatatttggtagaaagattcagcaattttacttatctgaaaataaaattgctttctgccatttttatgtgaraggaaagtatttaatatttatctcagtcttggagacagtttcagatcctggagatgcacaaattttcccatcaaactctattgactcttaatctttttaatgcttttgtcccttttagagttcctagaatatttttcttcttcattgaaattaaaacttgaagaaataggtgtactagcagcatatatggggaggatttttaccacaattaaaaaagaggtagacttagatttgggtagggaaagagagaaaactattagtatttaagggtacctacatcatgtggcagacaacgagacatgctttgtrtacttcattatctactattttcaaatgagatgtctgaggattagaaggttcagtgaattctggaagatcaggaagagagtggcagagctgagactctttatccactcaaaagtgtagcctagttttgaggaaaagggaggactaaaggccagaaagggaaagtaagattcaaaagaagcaggtggtgctggagcccacagctgcctgtgagaagggaatgtccttacatctttgtaaacaagacaaatgaaaatacaatcagtagagtaagtggggagagagggatggtgggtaaaaaagcatataaagcattatttgaaattataacaatatcaattcagcataaaagttaggacatgacgaagatgggatatgatatctggaagagatgaaaggaggtaggaatatactaaggataaagatcctgatctgcttttaaacactaagcattagtatggataggataagaacacgaataaccactactgaaataaaaatagaatgtgtaattttcatactcatggggagagaaaaaccagacttaacccgtggaaggtagacaggagaaaaagtgaagtgaaacaaacgaaaagataaaatatctgaaataagctcaaagaataattagtgtaaatgtgtagtgattaaacttatccagcagattctttaatggatagaaaacaagatgctatagtattttattaaaaaaaaattcaagagaacacacgctaatgtaaggtgatggaaaaatttatacttgtcaaatacaaagaagaaaaaggaataagaagaccaagggagtgaaatgaataggaacatatccacatgtagtaatgtagctttgaggtacagaaaacaataatttatggcgttagacattgatttagcaaatatagttagaaatttaaaacagtcctctcagaaaccaatgaagcaatgagacaaaaagagagatttggataacaatttgatgtctcatgtatatagaacttattcaacaaaagcagagcatactttatttcagagggcatgtggattagacacaagcttcaactttcaatgagtcaggaagcctcaaattctaaaaaatcaacagcttagaggttctcttaacaacagtgctataaaatcagacactgttaacaaaaagatagcaaaaacatcctatatatctggatatgaaaagacatactatgaaataaccctcaggttaaataggaaataataacaagaatagcaaagttttagagyggagtgataataaaagcacagtaggtgagagatagagctaatggaatactttcacggcaatatatagcttttgttacccaagagaaaaacactaagtctggaatcctataagcccaaggtttgactcaagtaactagaaaaactgcaacatagtaaatccaaagaaacaataaaggaaaacaaatcagaggaaataaatacaaatgtggtaataaagtaaaaataattcataaaagccaaagaaccagaagttcattatttaaaaaacttcataggatagatcttacttttgaataacagatgaagaaaaaacatctccatgtaccatgataaacacaatacgaaataggtaaaagagataattacagattatatttttaaatccagtaaaaagaatataagtttttaccagtattatgtgaaaaggatatatggctaagaaattgatacaagaaaaaaaaaaagtaaatcagaaaacaataaattgtaatgattgtcaaaacttagtcctttctggcacaggagaaaaagacacagtttgacaaaagagttttgtttaacgctcatgaaacagaaaatgctcgtttaataaactctctttggaacaaaaaagaaaaaccaaactattatgtttaatcttgataacaaaaactagataagttggctgagcacagtggctcatgcttgtaatcccagcactttgggaggctgaggcaggtggattacttgaggttaggagttcgagaccagcctggccaatgtggtaaaacactgtctctactaaaaatacaaaacttagctgagtgtggtggtgggtgcctgcaatcccagctacttgggaggctgaggcaggagaatcgcttgaaccggggaggcggagtttgcagtgagcccagatcgtgccactgtgtccagcctggaaaacagagtgagactctgtctcaaaaaaaaaaaaaaaaaaaataggttgagaaattattggccaacttcacttatgacattcaaaaggctaagaattcaaatctagcagtatattaaaaaataataccttgtgacggagttgaattaatcataatagggaaagaatagtgaattattatttttaaatttgctaatgtagtttgccacattaatggcacggaacaagcaattgtgtcatcagtgatataggaaaagcatttcataaaaccaattttttttaaaaaaaggtatcaacccttagaaaacttgaaatagaagggatatttttagcttgattaaaggcttcatattaaaaacctagagtagacatcattcataatacaaaaaaaaagaagtttaaactcagccctcttaaggtcaggaacaagaaaaggatccctgtgttacttctgcttctcaatacattaccacatasctgaccaatgcagtaygacaaagaaacatgaaagtaggaaaattgccatgaaagatatgattatcattatttctaagtgaaatcatatatataaaaacaaagagaagtccgggcgcggtggctcatgcctgtaatcccagcactttgagaagccaagatgggtggatcatgaggtcaggagatcaagactatcctggctaacacagtgaaaccctgtctctactaaaaatacaaaaaaaaaaaaaaaaaaaaaaaagccgggcgtggtgcgggcgcttgtagtcccagctactctggaggctgaggcaggagaatcccttgaacctgggaagcggagcttacagtgagccgagattgcgccgctgcactccagcctgggtgacagagcgaaactctgtctgaaaacaaaacaaaacaacaacaaaaaagagaatcagcagaaaccattagaagcaatgcaagagttcagctagattgccagctataagaacgtagaaaaatcaatagctttctgctgtattgggagtaactaattataaactatgacaataataagataccatttataatagtgacataaactaaaagctatctaggaataaatctaagatagaatgcataaaacrtataagggaaatttaaaactctattacaagagttttattatggtattaaagagcataaatgcagcattcataaatggcttcgttgaatattttgaagatgtcacattcccctcacccrtcttacaatttaaattcagtctaatcaacatctaagaatttttttttgaaaggggcagagtggaggctaaaatttatatgggataataaatacagaaagaggatctctgtttttctttagacattaacaagatacagcaggagctggcaaactccccctataaaccaaatctgggctgctgcctgtttwttcaaataaagttttactggggcacagccacgcctactcatactgctttcatgctgccatgacaaagttgagtaattgcaacagacaytgtgtggcctgctgtgtctggtcctttacagaaaaaaaaaatgtgcaaaaatgtgcgacctytgttctacagcgtctggctctgaagcagaatagaaaggagtctagacttattcctgtgtatatatgggaacttactgtaatcattcccaggaattggtactaggaaaattggctcacaaaaagaaaaatgaagccgtttctgtatttcatactataaacaaagttccaagtggaataaatacctaaatgttaaggatgaaaatataaagtcgatagaagaaaatataggaatatatatatttgcaaacttatggtagagagggatttgttcggagagatttgcagagcacaaactataaaaagaaaattgatggacttggaatacatcaaaatgaatgatttctgttcaatggagggaacgatagagaaattaatagatggtgaaaatataattattgtgtttaatagaccatgatcaatatttagaatatacaagggactctacaaaattagaaaattgaagggaggaaagcaatatgaaagaggacaaagtatatgaattggcaattcataagaagagaaacatgcatatacacacacatcacactattagagacaaatgaagtaaaaggaagagacgccattttaccattcaataattaaaaacttggaaagcaggaagtactatcaagtgctggtaaggatgtaggaaaatagaaatcctaatgtattgctgctgggcgtgcaagctggtgcatatattttagaaaatctaagtaagtatctgacctgaatcccaacaatgggatgctaagataggaatccagggaaacgtgtaagaatggtagtcacagtgtaacttgtggtaaaaggttgtaatcaagctagctctacagcactagaggaatgggcaaggaatactacagtggaatgcagtgaaggaattgtttatggcaacatggataaatttctaaaacaatgttgagagaatacagaagaatgggatttaaaacctacaatttatatacaaatttaaaaattatgtataagggccctgtgtatttttgacaaaaaatgtatgtacacaaacatgtaaagaggattctgaataatacattaattatgaaaaagtgaatttctgtggtgggaagggagggaatgggactgaacacagaggacaaaaaggaaaatgattggaaaagtgaaaagaaaaagaagagcctttcatgggctcatgataatagtagctcatcaagtagagcctgtgctaagtcaattctattccattatcctgaaagaaacttctggtacatgacttcttctggcaatgttagatccatgtgctcagacagtgtcatcaggtatgggtctctgtgtcttcactgtctttgcctyagtattggctctcacatcaagccagctcttttttaggaaaactcgtagctgtttcaggttcatagtctaccagtttggcaactcagttgaaagaaagtggcattgttactaatagcagtattactctgaaggatgtccttgcctttgattggctcattttgtgtcctgtgtccactcccgaaccaatcatatgtcaaaggactatgggtgcctgggtcacttgcccatccctagaaccaggtagtacgaatagccccacatgtagaatatggtggggtgttactaaaagcaaaaaatcaaagtggtacagctaagactctaaggaagtagattctggggagggaaataatcacaggtcacttgaatcaatgctgtttgtagaatggtggatgtgatttgccatctttattcttgaaaaacaagaaaaaatgaaaaatagctaactccaaatatctgaagcactgccacttgcatgatacttgttttatatgatcccaaggaataaagtcatgaaaaacagatggacttggtataaagagcaactatgttatttgtagagttgactgtcttwggaggaatgtgtgatgaacttcccatcactggacatattcaagcatatgctaggcagccatttggcaggaattctgtaggaaaaggcccarggattgggaggatagttgggtttggtcagtggttctgaaacacctggacagctatggaagccttgattgctgggcccttgtcccagagtttctggttcagtaggtctggggtggggcctcaaaatttgcatttctaataagttcccaagtgatgctgatgctattgtggagggacgtcaccttgagaactgttgggtttttaatgagctggttgtaaatgttctaaaaaccattatcttgtaccactggggcaaaccttcctatcttatttctttagtacctgaaatgtgtacagttctggctatgtgggtgtgtccatagtaagtgacatttgcacagctctctgtcttctgtgtcattgagaatattagaatcattaaacaatcatgcattattcatgtgctatataaaataaggaaaaaaatacactcaacatgtttttcttctgctttcacaccagcaacaacaatcagcaaagactactactgtgaccaaatgtgtggggtttctttccccccaacacacaaagcagcggrcaccagctggatgtcctttgattcatttcagaagaatttggatgttacgtacctggagatagcctcagattccacaggttgagggctcaatgccatgagactgtcacctgactttcagacaccagttgcaagtctgggcctctggaacttccaactgactataaatcagggaccccatggtcccttctttgagttcaatcaatttgcttgaacaactcaaagaattcagggaaatacttaagtttaccagtttatcacagcaaatattacaaaggatactgatgaaaagatgcataaggtgaggtatgggggaaagagcatggaacttccatgctctcccagggcgagccatccttcaggaacttctgcgtgttcagctatccagaagctccctaaacctgttcttctgggtttttacagaggcttcattatgtaaacatgaccgattaaactgttgaccattggtgatcaacttcaccttcagcccctctctcttcctgggagattgaggagtggggctgaatgttctggccctataatcctgctttggttcttcttttttattttaatttaatttattttattttatttatatatatatatttttattatactttaagttctagggtacatgtgcacaacatgcaggtttgttacatatgtatacatgtaccatgttggtgtgctgcacccattaacttgtcattcacgttaggtatatctcctaatgctatccctccaccctcgccccaccccacaacaggccccagtgtgtgatgttccccttcctgtgtccaagtgttctcattgttcaattcccacctataagtgagaacatgcagtgtttggttttttgtccttgtgatagtttgctgagaatgatggtttccagcttcatccatgtccctacaaaggacatgaactcatccttttttatggctgcatagtattccacgtatatgtgctacattttccttaatctagtctatcactgttggacatttgggttggttccaagtctttgctattgtgaatagtgccgcaataaacatatgtgtgcatgtgtctttatagcagcatgatttataatcctttgggtatatacccagtaatgggatggctgggtcaaatggtatttctagttctagatccctgaggaatcaccacactgtcttccacaatggttgaactagtttacagtcccagcaacagtgtaaaagtgttcctgtttctccacatcctctccagcacctgttgtttcctgactttttactgatcgccattctagctggtgtgagattgtatctcattgtggttttgatttgcattttctctgatggccattgatgatgagcattttttcatgtgtctgttggctgcataaatgtcttcttttgagaactgtctgttcatatctttcgcccacttgttgatggggttgtttgtttttttcttgtaaatttgtttgagttctttgtagattctggatattagccctttgtcagatgagtagattgcaaaaattttctcccattctgtaggttgcctgttcactctgatggtagattcttttgctgtgcagaagctctttagtttaattagawcccatttgtcaattttggcttttgttgccattgcttttggtgttttagacatgaagtccttgcccatgcctatgtcctgaatggtattgcctaggttttcttctagggtttttatggtttttggtctaacatttaagtctttaatccatcttgaattactttttgtataaggtgtaaggaagggatccaatttctgctttctacatagggctagccagttttcccagtaccatttgttaaataaggaatcctttccccatttcttgtttttgtcaggtttgtcaaagatcagatagttgtagatgtgtggcattatttctgagggctctgttctgttccattggtctatatctctgttttggtaccagtaccatgctgttttggttactgtagccttgtagtatagtttgaagtcaggtagcatgatgcctccagctttgttcttttggcttaggattgacttggcaatgcaggttcttttttggttccatatgaactttagagtagtttttttccaattctgtgaagaaagtaattggtatcttgatggggatggcattgaatctataaattaccttggacagtatggccattttctcaatactggttcttcctatccatgagcatagaatgttcttccatttgtttgtgtcctcttttatttcgttgagcagtggtttgtagttctccttgaagaggtccttcacatcccttataagttagattcctaggtattttattctctttgaagcaattgtgaatgggagttcactcatgagtttgctctctgttgtctgttattggtgtataagtgtgcttggtccttcttgtgatcaaccccatcctgaagctacctagactcttagaggctgctagacaccagtcaatcattagcatacaaaamgacatcactttggagtttctaaggattttaggagttgcgtgccaggaaatggggttgaaaaccaaatgcatatttcacagtatcacaaatagccaactattttctaatttcatcctttttgtaatcctttctctgtttttctgtagawtgatccatgttcctcagtttcatactaggctgttcccgaattagaaaaatgaagtagttttctagggatggtgtttcttagtcattcacaaagtgtgtcttagtcattcacaaagtaactttgtcatgtattggcatccacctgattgaaaagtcattccttggtgctagatggatttggcttgtctcagctgtgccatttgccaaattcccttcagcctccctttcctgcccccggccccccatggctttccctcaaaaggaagacgcagaacatttcaggtaccttgctgctttgtggccctrttacaaccaggaattgttctagttttgaactccgttttgctccttccttctttttaaatgttttttttctcctttattttggagattttactagaatagttctctggaagtgctcatgtttttgtaattgtaggcaaggtcagacagtgttcgtacttgttctaaattgctattatatgaacacaaaaccatttgagagaagcatttaagaattagaaggtttatagttaatacttaatgaaaattttcagcttagcagacatgacaaaatagatgggtaaaaataagtagctgacaaatagggccttgtggatttgagttaaggtggcaccgtgaagtgcagagggagtgaaggggaaaarctgttttattgtccacgtggaagcttctgcttgaaaattgctaactctaatcaaggaaacactggtagggagagtggagtattttagaaagactttcccagaatgcatcttggtgaacattcaatgaggaacaatttcaatggcatcctctctgcaactaagaatctgtagtaatggaatttgctttctttaaggtggtatatgaactgagtttcttaattgaattttataactatccattgtcttttcttttagacttcaactgtgaggacatgtcgttcagatttggccaacatctcatcaagccctctgtagtgtttctcaaaacagaactgtccttcgctcttgtgaataggaaacctgtggtaccaggacgtatcctttctttttttttttggagagggaaaataaaagtcttctgagcctaaccagccaaatgaatataaatacaagattggcctccagtctgtccaaaaaggtaaataaagaatccatctccctcccacttcggagacaccaggtaagatgttactcatatttattctgaatccagttggtggcaccagtaatatgcttgatcaatgttgcagaacttctgaggagagttgcttagcaaccgtggctttggaggtgaatttttgcttgaccttttcactaccatagctgagtaaataaataggtgcttctaaaatgagcccagtgaatatcacgggcacttggttttcagcttatctgttgtgaattttaatagtagattgagtggtgcctttgtgatgtggaagtaagatatgtgaggatttgagactgactttgttgctttacctcttggagatcattcaagttgtgcgttttaattaaatttatattatagatayacttacaaatttttttwaaaaaatattaggacctgaaatagcattttctcttgggaaaaataccagcttgcagatcattgaccagtgtcattggtggagttgttttatttccctctgaccactgagttgtagtctttcctcctatagacttcaataggagctttattcttttgcagtgggaataacaagtattggtgaaatgcytgggaagttatctttatgttgttaaaagtttcactcctgattgtgtgcatatgaattttgtacggactcttcaggatgtttttctctttcctccttcacttagtttgccatgcagaaggcaacagaataaaatttgatattttcagataataagtattttccacgctgagacatgattttgctttgaaatgaatttcttagtaattctgaatgtacaaatatgccaagaggtttttcagagtaagctacattttttttccagtgaaaatgtggaaagtgcctgagaactttaygaacaagcttcttttctagccacgtaactattgtatgctaaaaaaaaaaaaaatacaaataagaaaaacatgtaccaaaagataattgtgattgtattatagactcccaaatttctggaatccaaattctagtcaaataaattgtattaatttagaaaactaataagcaatactctagtaaatatgtaagcttttcttaatatttaaaactcttcttttaaatgagtctaaataatattagaaaactattttcttctgtttattaaaaaaaaacactagaatgatttagaaaagccctagaaaacagcacttttaattttaataccaattgtgtattgaaatcttttaaaagacctgaatttcttgaagtaacattttattttgctataagtttgtagtgggctttttcctttggggttttttaaagcaaaatgtstgtaaattcaggtgttaaaagaatatggtttaaatgccatctctctctaggtgccagctttaactgacttttagaaaagaaataaagggacctgggatgaaaatatgaatttagacaagatccatttgtctaaattcastctcattcctatgaaaattagaggtcacagagatgtaccacttttttttgttgttgttccttttgaggcagagtctcactctgtagcccaggctaagttgcagtggcacaatcttggctcagtacaatctctgcctcccgggttcaaccgattcttrtgccacagcctcccaagtagctgggaccacaggcaggcactaccacactgagctaatttttgtatttttagtagagayggggttttgccatgttggccactttttaaaatggttaataatggaatgaactctgctttgtagtttttttactcatatcttgagagtaatttgatatttcagactttttaacaaactcagaaaaagtgatgtctaaaaccagggcatacctgagtttgaactcaagaaaagtagaaatgtctatgtctaggaaaatatctgtagtgaatagtgagcaagtagtgaatgacaactcgtttctttgtagatggcactggtgtcaccatttgggaaatgaaccctgctcagttactttatatttgagtaaataccaagggctcggaraatattttattaaaattaacacacttcagtttgtttggaaggtagcaagaaggatccaaccctctctgattataagaacaatgagaaccagagcttttttaaaatcattatactctataagtctaattaacagctgcagtatttaaaacagtctcagggccagtagacagtgtattcagacaatgctttttatgtgatgattttgtaactttttattttactttacctttataaactctgccatgttacaactgggagacgcatcttttttttttttttttttttttttgagacggagtctcgctctgtcgcccaggccggactgcggactgcagtggcgcaatctcggctcactgcaagctccgcttcccgggttcacgccattctcctgcctcagcctcccgagtagctgggactacaggcgcccgccacsgcgcccggstaattttttttttttgtatttttagtagagacggggtttcaccttgttagccaggatggtctcgatctcctgacctcatgatccacccgcctcggcctcccaaagtgctgggattacaggcgtgagccaccgcgcccggcctgggagacgcatcttaataaggtactcctttgcttgcagaaagctctagtcttttgtcctgagacttgagaatggaagatgtggatagctctgtccactaacatttcataaataaatggtgagatgtctggagtgggcttttatcttcctccagtgttctctcctgcctgccctagtctagcccttaggtgtggttcatctagatttatgctgtctccctgcctctgggcttttccaatgtagcctataactttatctgaaccacagccctgaccatatcattcttctcttcccttgttaatmaaccaataaggaatgtctgttttttgaggataaagtccaaattccttagaatagtttttaaggaccttcattgtactggctcagtctcccttctttccggctgttccctgaatatgtgttgtactatccctttactatactttctcctgcccctcacctcaackggagattcctccccatgcttttcatttcatctgaagtgctttgataactgtcccctgctcctagggaagaaaacaaaacaaaactctgtcctctgtttgtgacactcacttccttattctcatgttgattcattcagtactttattactgagctcatactctgttccaggtaccaagaccaaacacayagcccagtctgcctcatatccaaagtacgtgcatccctatttctgtctgcactgagtctttgcttcctatggacgagacctgctcttgcacatctcttttttcttagcatccaaatgtactgtgttcactgaatctaaagtgaagctggaaacatcaggagtatatgcattgttccagttaacagaatagagagacaggatgtgccgaaatcccaccttttcccgtttcccatccccaaggccaagtcttgtcrccacttttttccagatgtttcagtatcatgtccaagctaggttttcccagcttccccttcatcctttgtccattacaattctgtttacaagcgtgtgagtgtagggagttaaatctaaaagcagtgaatgaattgatggcagatgggagaaggttctttgccatttctttacatgttaatttgtgaatggaccaatctgtgttttaagggcagtatattggcatctttatgtaaaatggaacattttattttgtatgtttgatgacttctyaaaaatggcattcaggtgccctttggggagtgtgccattcatgagaggcttgtaaatgtcatctttgaacttgtctctcttataacattttgctgcccctcaccaacacttatttcttatgactttgctcactgactttttcatagctttcagagaaagaaaaagaactgtcaaatcagaggccaaagataygcttttgaagcaggatcgtttgcttcattctcaaaacagccacttcagtccctccttgttcccacctgaagcaaacgcttctgttccttgccaacactgtttaaagcctattgaacaggctttggcttctgtggtgcaacgcttagaagaatatgtcagaatgtctttaatccattaatttcttgttactggaaaatgcttttcagagtttcttggtgacagaatcattttgaagagtacacattcagaattctgcagcaaacattttattcctgtgtctcagtgcagcccagctattgttcatggcttaaataaatttgaaccattatggctaatacttctccttacccccactccctttgctttgtgctgtgtctatctctcttcttgagttgagcatgaaaatgaatttaaacattagtggtatccatttgaagactggggctttcattgtaaataaaattattcatttgttctgtcgtcttcagcagagagwgtattgatctctgcattgctattctgaatggcataaggagctgcaacatgagggagacacagcaacatttgtggatgaattgaatagggtgtgtaatgacagaaaccttgctcactgatcatactgtattctacaaatcatacgtcaacagtttattgaatcagttattaaaaagagcagatttttccaatcaagaccatctcacgcagaatgttaccagggccatacaacattaggatgatgcatgtagggacagccttacaaagtatatttgtgagagaattagactaggtaactttaagaacatttctgctgacacattagaaataaaaagttggctaccatgcaaacagtgctccaagatccaaattcaaaaggtaaaaaagaaaactctgacaaatatcttttaatacggaatattaactttccaaagagcaatgttaagtttcccccgttttcagaccgttaccatgttgagtgttcctgaaataagtggaaaaataataaaaatagcttcattacttaacagtgattcttacagaatagatgctatacataaaagcgcccttttagtccttccataaaaatcagaaatatttgtcatttcctcagtaggttgtaatcttgtgaattcctttaattgttcaggaaactgcagttattaktgatctttcatttctctaaagagtttcttttcggccgggcgcggtggctcacgcctgtaatcccagcactttgggaggccgaggcgggcggatcacgaggtcaggagatcgagaccatcctggctaacacggtgaaaccccgtctctactaaaaatacaaaaaattagccgggcgtggtagcgggckcctgtagtcccagctactcgggaggctgaggcaggagaatggcgtgaacccgggaggcggagcttgcagtgagcctagatcgcaccactgcactccagcctgggcgacagagcgagactccgtctcaaaaaaaaaaaaaaaaaaaaagagttcttttcaaaccttcctgtacaagtaaaatgagcacaagcactattttaatatctttatagctaaagataggtttttgctcttaaaatttccctaagcacatgtcttgtctttgctctgtgcatgcttgttgtatattagccagcttaagagcttttggaggagaaatgttcaaagayaatattgctgtccattgtagtggggcaagttggttttcttgtggtcacatttctttcttgacttcatttggcagattattgtgttcaaagayatgcatttagcagtgactgttaagttggacctttctttttcctacttctgtgggaaaggtttccatatgaatgtgcacctacccttgggttattagagtacatggccaccagctacaagcagcttctgatagcactggacaatgggaacaaaggaagttattggatgctgtcatcattcaaagttgaccaacatcttttttcagtgtctaaaatccaccacagagaatcctgccaactcccattgtaagacaaacttgctgtgaccatcatccatcttgacttgccatctaaagaattacaatgcagaaaacaaattcattttatctcacataccagctgatcagttggtagtgagctgccaaggttgaggactcaggctgcacgtggggtcagaaggcagtaactgtgatgggcactagaggggaaggggaagccctccttgctagtctcttcctctcccaagtttattttttgttyctggagccgagactgacatctttattttttatcatagacagaacaatggattgttggaagctgatgctgaaggaattaagtaggtactttgtatgtgtgcaaggaaggtttgaaattggatgragaaaaatgtgtggactttgtgcactttgccctggccccttcaaaatgaaggtgacatacccacgaaacactgttcctgaggcatgtacatgttggtctctagacctcatctagactacttcctgctatctgccttctcttccttgactcttctggctccttgctgcctgctctctggtgaggatatgtatgtacaaagtagccttgtgggttactaggtccctgttgcttaatgatagttttaactgtctttccttgatcttgacctgtcttccatrctatgttttaccttctagccccagaccgtgctgtgcatgggatggggtgggctggcctgacctgattatgcattacrggagaaaaattcaactgtcattttgattaggacttttagcaggtacatttctcagaattgcataaaggctgtagagtcacttttgcaaccagaaatgtgtatctttacgatctgcggatctacacagaatgtaattctgttaatgtgtatgtatgctgggggagagggatattaggggtgttctttctccaattctagtgaatggtagaatgataattatatgtatctagacaacacttcaaatatttcttatgttgctatcatgggtatcctgtaatttggaaagctgttcaccatttctatttatttccacagtaactttttcaagtagttttaaactgtcatggttaacaatcactgaactctgttcgttatattctgggcatatttttgacctgctttccatgcaagtcatcagattttaaggaasaggaaaagactggtcatggtgttgcaggcatcgcacttgctaaggaatataattagaagtaatgaatggaataataatacatcattatttataagaagtgtcatgtaattaactcaaataatgcagaatatattctaatttccatttggaatgaaaataggtttgtttgaacatcagtaggtagttacttattcttttatatttcatgcacatatcaaaactgttaaaatctactgagtacatatacgtggatttttttacaacagtcaaggtagctttcctctcctaatagtcttatgtatgttccttatttttattatatatacaaaatacgtatatgtgttcaactcttagaattagcataattaatttatatttattgcaaattaatgatctaatttatttacttagctgccatttcctttctcaaactaattaactgaaaaaataaccataaatttgcaaatagcttctgggcacaaatcctacattggacttatccttaaaaacctctacaataccagatatctgaagtagtttgcaatctaaactatctttgtgagatttctactacaggctttaaatatatttcaggagccttggtttagcttrtatctgcctgcatttgggggtcaggatatgggtggatatgtcttaggcagtggagttatgtttatgtgtaacarttagtatgacaggtggtactgaccaatgtcaaaggtggttcctgaaagctctctactgtgccagacatcagcctattaatttgtgcattgtggggaggtctggagagtcccaggggaggaagaaaagaggtggtgagcagcacgcaagggtaataagtaatacttgtgtatttcaatattgtaataacaggaatagacatgccaatgcacatggtctcagtagattttagagggagattktagagggagaaaaacagatggaagaagctcctttatattcctaagaccaagcatgttctttgttcttcaagaccaattaagtcaagcatagttgtaggttagctgattaattaagaccaacagaactctttcttcgtatcaaatggtcatcttcctcacactgaacttagcctcctaatagtggtttaagggaaagcttacttgtagcatgggggatactgaggcaatttccttccttccttccttccttttttccttccttcctttcttttccttttgtatatgtgtttggggtaactgtggcagtggaraktatatttatatacatataactaatatcttacattaagataattttaaataattaaaattatattttatgactaacaatrcattattggagtcaatattttgtttcacacaggcacagtggtgcacacctgtaatcccagagttttgggaggctgaagcagggggatcacttgagaccaggagtttcagaccagcctaggcagcatagctagacccttttctacaagaaaagtttattggctaggtgtgatggcatgcatctgtagtcctaactactagggaggctgaggtaggaggattgctttagcccaggagttcaaggttatagtaagctgtgattgcacctctgcactctagcctgggctgcagagcaagaacctttctgaaacaaaaattgttctatcctcattggcctatsagtggtttgaatggaaaagctgaggcacagaccaatggtggctctagttcatgggagtctgggctttacccaggacttttgattctcattccattgttcatttcaccttctccagttacatttcacatrtgctgcaaacttctatgtacggtggggtgggtgtcctgagaagttcttctccctagagtttaaacctttcccattagccccactttctagtgttgtattttcctaaatctttactctgccatttatatttttatgggcattttgctgttagtggctttattattttattgtaagcttcattatcatttaagaataagaccaaccttagtgacttctgaaagtctagaaggtttaagccttactctccactgccatctatatggggccaggcagtttagcttggttagccgcataatttgctctgagataaaatgggtccaggaggagctaaattcatctggctctccaatttttctcctttctgataggttttgaaatgcctgaagttatcaagarcttctttttatctttaagattaattttcagttcaagagatttaygtgctaatactttaaaagttagccatgatacccttccattcaccaaagatgattgctttaatagttgttaaataagatgtgtcaagataaaaataaatcaacaggaattacatgaaaatctagagtgtttcacatgcagaggcctagaataccagttagtattttctattctgtttagggaccaaatgactctagaagccatctctcagggagtcatatctgcagtaatgtaaytgaagttcaggagtgcagcagatgttgagtgaaacttttcatatttccgcggaataaacagctaaggcctaagcaggaatgctgacatgtggggacagatgctycccacatccacattactgagaggcagcagcagaaccattcctacctcactgaaacatacctccacgcccccaaaccgcaaagggagaggatacgtgaggacaaagatcgacagttgaaatgaggagtgtagggatgctttcttcttccctcttctggaataattactcccactgcctcaaaagtcacatctcttgggggatgctttccacaaaatgacactggcatcttgttctttggcttgatgctacgaagctgtaggacctgcaggctgacacaggyactgtcatgatctgggagtgcagggaggtacarttgcttttggagagcttcccatgtgctctgtggagtttggaattgtacatgagcacacaagagtgcttgcttctcatctttgcattcttgaatgtagggtggggcaggggaggcttgttggagaggcctgtagtagcagagcaagaagtcactgaagaggagtagtgttcctgggaaaaaagatgagaacaacttttctacactatttcaccttttcggtagccctttgaagaagcccagaagcaccaacctcagcaggtcccccggttcctgtaaatgaccatgaatgtccgagtaggaggcaggcaccactaggttgctcaggtagatgctgggccaactgaggtgctggcctctccagagaggggattgggtcatggaacaccggcagacytaaaagggagacatggctgtccttttgtaaatggatcctcagaaacaaacgggggcgagactttactaccttcctggaaaaaacatgtctgttaattcaccagtgcagactaccgtatttgcagaggctcccagcagatggaactggagctagaccagggacacttacctgtcacctgtttgtgtgtgtgtgtgtgtgtgtgtgkatgtgttgtgtgtttcattttgtgtttttgtttttgagacagggtctcactctgtcatccaagctatagtgcagtggtacaaccttgactcactgcagccttgagctccaggactcaagtgatcttctcacctcagcctcctgaacagctgggactacaggtgygggccaccacgcccagctaatttttgcattttttgtagagacaasgtttcaccatgttgctcaggctgatctcaaactcctgagctcaagcaatctacctcagcctcccaaagtgctggaattacaggcatgtgccaccacacctggccacctgtcacctgttgacaggcaacctgatacctaagaccactctgcctttaacgctagcatagcttagcctcactatgggggaacacttgtagagagctctaagtaataaaagttgcatctcaagtctgtgcttgataggatataaaattttaaaagaaccaagactagaattttaaaatggagagatttacaattatggaaagtgactacatagttatacgttctgcccaagatattattaaagagccagaaagggattcaacatagggtggctggaaaagtaatggcaaagaatataatggtagcacgtctttctcccactaagttgagattcttcaattattgtttacacaaagagatgacataaatcttaaaaaaaaggggttgtcagtcaataccacattaggtagggtgtgatcccttyaattcttagagtcagaatcttgtgtatattagatggttgataaatatttatgggataaatttaattttggttcaaaacaggatggttaggtagaggaatattcwtttaattattaaatattttctgaagatctgtatatcaggttcttctcattttcatttctaatctaaatttggcatgctcttaagccaacaaagtatcaatgtaaggattaaatgctattggaacttttttgcatggcagcagccggagtgatcctgttaagacttgttgaatctatgtcacttctctcattatccccacagtggcttcctaccttcttctaactaaagccaaagttaycacagtgattgacaaggttcctacttgtactcctccatccaccccctgccatcaaccattgcccctctgatttcatctattaccatttttcctgtagtgagttgaatggggatccctcaaaagagatgtccatatctcaatccttgaaacctgtgaatggtaccttattaggaaaggggtctttgtggatgtgtgagttaagtatctcaccttgaggtggggagattatcctggatcagccaggcaaatcctacatccaatggcagtgtccttataagagtgagacagggagattacatggagaaaaggaggacacaacatgatcgtgaaggcagagactggagtgatgtggtcacaagtcaaggaatgctgacagccatcagaagctggagcagcaaagagggagcgtggccctgctgacacctggatgccacgctggcctccaaaaccatgacagcatcaatggctattgttttcagccaccaatttatggtaatttgttacagcagctacatacaactttcaaagctccccacattcgctcagatccaaccacactagattccttgttgtttgtttaacattctaagcacactgctgcctcatagcccttgaaccagcagctgtttattcttcgtggaatgccaattccccagatgtacatatgctatgttcactcaactccttcagacctctatttagattgtgctcaaatgtcacagaatagtctttcccattatcttaaaattgcacccctaccacatgacgttcctttgtagtgtttatacactaaattattatataatttatttgtgtgtgtgtgtgtgtgtgtgtgtgtgtgtgtgtgtgtgtgtctcaggctgactagaatgtgagctctctgagggcagggatgattctcaggtttattcatgaatgcatctcctctgcctgggcagggccaggctcataggaggtgttcagtaaatatttgttaaatgaatatttgctagatgagtgaccctggttgaccatgttggctttttagctctaaagataaaagaggacaacggtcctcatttaacaagtagaataatgtggtaagttctcacaccaggcagtatactgcaatggttaacatagtgtcaaccaggatttctatgtacctaacacacatgaacacatgcttggagacataactaatattcatcattccaaagtggcctgctttgaaagagagagaagtaacaggtggtttgagcatgaaaaatactcaacccctcccatgcccagcacaggtttcatagatttccatgtggattccagccaggctgatgaaatcagttatttcctcagctgagagaaatctaacagaagggtttgataactcgtcggctcatgagatttgatttcccaagattgtatatgccactgtcttgccttcctcaggaagtctggagcagctctgtaagcaatttcttcagtttagtcaagtttttatggctttatcatcttggcttcccatgcatacaggttgccttacataacatgcccttttgtagatctctatttctttctgatgatccctttgatgaaaccttcttctgatttattatttctataataatcaaggaaatttccattagacaattttagtttgtttattcatttatttcctagaatttttaaaacatgatttaaggtgactatgawaaagtagagtaagatttaagtgctttaaaaaaaagcaaactacaaaattcaagaagtagtaaaaggaaagtaagatggaccaaaagtgagattagtgcatcaaatagatataaaatatttatatacttgctagagrtagtgatatggtttggctgtgtgcccacccaaatctcatattgaattatagctcccataattcccacgtgttatgggagggagcccgtgggagataattgaatcacagggatggtttcccccatactgttcttgtggtaatgaataagtctcacgagatttgctgtttttataaggagtttcccctttcacttggctctcakttttccttttgcctgctgccgtgtaagatgtgccttttgacttctgccatgattgtgaggcctcccyagccacgtggaactatgagtctattaaacctctttttctttataaattacccagtcttgggtgtgtctttagcagcytgaaaaccaacaaaaacagatgggtcacaaagttggccctgaaytttctatcaccaacctaaataaggaaagagcatcaattcttgaggtaaaaataggctgattgttcagaaaaatgcagaaatgtgcacaacaccagagatcaggcgattttctgtgaattcttcctcaaggagatgatgccagaatatgtaattgacagcattctcaaaacatccttccaatgcacatggaggctgtttctcaaaaatatgttctgagtctggtactcaacatctctactactcctgccaaatcttgtctgaactgggtgcagtgagctctcaggtttccttgtttatcactccygcaactccagtctaccactatccatcctccagtctaccactatgtagctgacatagatttttaaaaatacagaaacaagaacaggttgttcctttgcattaagaaattatggttgtttctggctgggcatagtgactcatgcctgtaatcccaacactttgggaggctgaggcaggtgatcacttgaggtcaggagttcgaaaccagcctggccaacatggtgaaaccctgtatctactaaaaatgcaaaacttagccaggtgtgctggtgggcacttttaatcccagcttctcaggaggctgagacacrataattgcttgaactcaggggggcagaagttgcagtgagctcagatcgtgccactgcacaaccagcctaggcaacagagcaagactctgtgtcagaaaaaaaaaaaaaaaarrcttctggttgctgttgctgtttctttcamttaaagtaaaatctgacattcctctgaccttcacctgccaccctctgacctacacagggtccctggttttcctcctttcaattcctgttcccttgtcatcacttacacacagaggccttccctgaccctaccacaaaactcaaaccatggaaatgatggttacaaggctctctcagtcctgtttctggtattgttgaatgtacatgggagaagaaagagctctgcctgccaatggctctactgcctcatttactgtctttgggtacaaaacatttgtacttgtcaaaactgcaaatgagctttggacagggaattggagaaatgtattttagtcccatatggggaaacttaggtcatttattcttttttgtttgatttgctcatgtgaagataaaggtattttctgctatgaaaacaggtatttgcctgcctcctgggctcttgtgagagaattaaaacaaggtgatatggaagtcagaagaatgaataaatttggcatattggaagcatggtataataattataacttttggccgggcacagtggctyatgcctgtaatcccagcactttgggaggccgaggtgggyggatcacgargtcagcagatcgagaccatcctggctaacacggtgaaaccccgtctctactaaaaatacaaaaaattagctgggtgtggtggcgggcacctgtagtcccagctactcgggaggttgaggcaggagaatggcgtgaatccgggaggcggagcttgcagtgagccgagatcatgccattgcactccagcctgggagacagagcaagcctccgcctcaaaaaaaataataatacttattttttttttattgtccattatcctgatgccttaaggttgatcaagagcatgggtcttggaatggacattatataatggtagccctaaatttgtaaaactgaagcttaaatggaatttaaaaaaatactgcatttctatgtgaacatcacatagcaactggaaaaacccagactcaagtttaaattagtcatttaaaaatggcattaaaataacaccctggatttaaaataaaccaaaaaatttataggcatttgatatgagcctttttcctttttttttctcttctatgaggcatggtagtaaaaatcaaacccaaccaaacaaactcacctttattatttctactgtttttggtacttgggaagaggtaggtgtgtgaaaaatgctgctgttcattcatggcttagagttgctttgccatagtggttttaaattaaaccctcagggggtttagatgagtctagatgctcaactctcattaaccataatgggagttactctaagtgtctcgctcctccacccacaacattgaaaaatgaccctctaacaccatgttagtgtcctctttgaactaattttaatggattttttttttgaaagtgaagcawctctgcaatcctggggtcattgagactaccaacaattcagcaataagcagtagaccttcattttggagtgttcagcctgtacatgctggaaaggtttggactaggactgacatgctctctagackagatgtttctcttttatttagtttcaaatcacactactgtttctttttaaaatctctttcatccacagctcagcctcctgatataatccgtacacaggaggtacggagcattaatgtagttctgatactactgaaatgttatggagaaaaggaattacagttgatccttggagagcacaggtttgaaatgtgtgggtccacttctgtggatttttttcaataagtatattagaaaaattttttggacatttgtgacaatttgaaaaaaaactagctagaaatatctaaaaaaagaataaatgtatgtcattaatatatgtagatactagtctgttctatcatttagtaccataaacacaaacaagcctaaaatttatcgaaacgtaggcacacaaacacagtctggacatggtgccacttgcagttgagaggaatataaagaaatataaagatggtgtatgaaatcataaatgcataaaattaactrtagtacatactgtactataagaaatttgtagccaccttgtattgctattggggtgagctcaagtkttgggagtatctgtttaaaactcctcaggacactaatcatctctgagctgatggtcactccagtaaattgtttcacagtaaaaagtgatctctcatggttctcatttttctttgtgtgtgatgcataccataaacctggaatagtaccatgggactaacatgaagggtcactagtgatgctggacgtgctcccaagaagcagagaaaagccatgatgttacaagaaaaggttaaattccttgatatgtacctacagttttagacagatgattcatcttgtaaatagatgatgtcaagctatggtatcaatacatatagtataatactgtaaatgtcttttctcttccttatggttttcttaatattaatattttctctagtttactttaagaatacaatacataatacataaacaaaatatttgttaatcaagtgtttattggtaaggcttccagtcaacaatagtctactagtagttaagttttgggaagttaagttacatgtgaattttcaactatgcagatggggagtggtacaggatcacttgccccttaattgttcaagggccaactgtaaatatattcaaactatttggtgtttttaatgcagtctaccagtaaccagctaatgaattgcttgactaaataaacgttttgtttaaattatatctatgaagctgcagtctagtttatatcaagtgtaacccatttttaaacctttcatttattttttctaatcataagaatatctgcccactgtacaaaataaaaaccatctataatcttattttccagaaataacctttgccaaaactgcagtttattcctttctacttttttctttgttcttacatgtttctcttgaaaaagagaaacactttataacatgattttaacctacttcattgttgacatttttctgacgttttaatatgtatgtaaaaaataattgttttttagacagtctcactctgttgtccaggctagagtgcaktggtgccacctcggtgctcactgcaacctccacctcctgggttcaagcaattctcctgcctcagcctcttgagtagctgggattacaggccaccatgcccagctaatttttgtatttttagtagagacgaagtttccccatgttggccaggctggtctcaaactcctggyctcaagcaatctgcctgcctctgcctcccatagtgcttggattacaggcatgagccagcgcacccagcctgcatataaatgaaatttttaacgatggtataatattgtgccatatggatctactataatttattagttattactgacttttcgacatatgtgtaacaaatattttggtacaggatctttggtaatgtttctgctaaatttcttaaactggaatcactacttgctataatattatgtggtgtttaaatggatgaacattcggaagttattgtatactagcactgcatgggggtacacatctcataaacttcaagaattaggttttttgttttggcctaaccttttccaagttgatagattttacatatctcactgtttacattttattatctaattgctagtggwgttamcttttaaacatatatatacattacctttatcaataagttacctatgaaggtgctttgcttctttttctattgggatatttttaaaaacccaatatgttagagatcttttacgaattaaccctctacctgtcacatttgttgcaaatattgttccttttttggccctagcctcttcagtttctttaagatgttattaacatgtagaaattttgtcatagttttgtcaacttggtcatttatgagtttttcctgttcttttatgcaaaatctatcctgagattaaatatttgtgcgtattttcttgtgattttttttgaatgagttttctttcttctaatttttattttgctagtccactatcaccaacaagttcatggaacttcataggcatgctttaaaaattcactgtatcttcctggccacccttgaagaaggtaaagaatggtatttccaagtttataaatggagagaccaggagtgtcatgatgaaccgggcagtatggttctagaagcacagcggtgttttcacattctaactaacttctttacagaactcctaagttggtctttatactattaattgctagtttcacatgtttcctgcataggggtaatattgaaaagacagatcttggggattgtgrcacaactataatgtgtcttctgagtcaygaaatgtactatattcaatatgacgttatggtgctgttttacattctagattatgtttaatataattttcatataaaatgctttctgcaatattgtaatttcttaaaaatgataagccatatatggcaattcccagttaaccaggccattggactgaagaccaccctttgaccgttgatgaagagcaaaaaattcatagtaatatcagtgggtcagccgcctgtagttttagggaggtgggtgtagagagacagaggaagtagctacttagtatcctatgattccgatgctatctaaaagacaactcatatttgatggagggaataaaatgtcaaagaatatgtgaaaggtatagtaggatgggatggaagaattttacatgtattgcatcatatatggcaataatataaataagaaagatatctacaacaagttgtgtgttctcaaatcacctcctgaatgacctttatcaatttttaaaaatgaaatagataaaaatttgcacaggtaaaaatatatttaacttaaccctaaaataacattaactcttgagcctttataactattcacccactttttgtcattaagagataccttggaatttgtcagcttaacaacttctcgacatgtttttatagccaaaatgcaacagaaattacattaaagaatttcccctgtctgatgtgactttgaacatgaaagggttttgaaaggatgttgctatccatcctcagaggagtagagattcaaatgattatgttttcttagctcccatgaagtcgaagtttgtatctcarttgatttctcaatttactgaagctcctattataattatccctattataacatgggtgtaattgatcactttcgctcaagtgatccctgtcattgtctcagctgtcagaatgtacaattcagtacagagacgttactctggcggagatgcttcttgcaaagccaggtcattttatttattcatctaacatataayatttatgctctgagattgttctaggcatttgataaatattaatttagcactcatgagcaaacctatcaggtgggtactgttggtatctccattttatagatgagagaatgagataatatgagctaaatcgatctagaccaaacagctattaagtggcagagccaggtttcaaatccaggtggtctaactctagagtcctttctctagaccagtggtcctggggccccggaaggtccccaagacctttgcagaatttgtgaagtagttccttttccaactatatgtctatatgaggccaacttcttcctatgctttagcgaagacatctcatgatagattgcatacagaagcagaaataaggatgcaattatcttctatcaagccattcattagagatttgtcactcttcacactagtttttttgttttagaaaatattattaaaatattacattaacatatgggtttattattttaagtaaatgaataaatattttagaattttcttagttctaacttggaattaaatatcagcaaatatagtcacataaattcaagctcttcggtgtagtcaatttttcaacagygtgaagaggtacagagaccaacaggtttgtggataggtcctctgaacccatagtatgtttccccactcctttgtctcagctccagatttccctgccttccccgccttccccactatatcaacttgagtgttcacttaaaaatgtgagccttatttcctgaaggcaaaggtgatttttgcatacccagaggcagtattcatgggctgaggaatataagctttgcagctgagggcctggatgtgaatccaagctcagttgtcttacaagagcaagccctgggaattacttaacctagatttccttcagttaccttatgcttcaaatgggcrgtaatagtatctacccagcggaattgttgtgaggatcatgtgagttaatatatgcaaaatgcttaaactctctctcgtscatatgaagcattcaaatataagctccattattgttaagtttctattgttatgagaattatagaagagtctaatgtgatttttgtgttctacaagttttcttaaagtttctcttatttccgtgaacattttttttttttttttaaattaaagcccaaacttccctttgtagcttgtttttcaaagcagagccaggtctatgacagtagccttgatcttaattgtgtggttagttctctttggggtgaggctactcttgaaatgcatttatcttcttgtaagcccataaatactgatattaatggtgtcattcctccttcctggacgaattccctcaatttcttgcatttcacgtcccgtaaatgtatagattttccttcctcctcctcccaccacatccagtggtgctgtttgtgttctgtgccagggacaggggcaggatctcctgccttgaaccgagctctgcagccttcctgccagctgcagtccacatcaggcctacagttggttttcttcccagcttccgctcacactaggatggaatattaccctcttataatggcttgtttatctagcagctctccctcggctccaggtcagaggctttcctccaggcaccactccgcgcctgcctgttcatttgcggtgcccactgttttgtctgcctgcctcaccttgtctgtcggaggtcactgtccctccagggaatgcggtaaccagctgcattttatctagtaaggtggcctctgctcacatgctcttgtgacagattacagcctggcttcccaccagggactcctctgagtgagacaccaaaggctgttgtcagtgtggctgttggtgggagagtcctcagtgtccaaagatacccttagcattttcatgtgtctgtaggaacgctttcrtgtgacttctgtgtctcctgatggatctggaaagatttctctcctctcagagacttctaggttgtcttactgacattggaggcaaaatggcttatgataaacactggaggatttttgtcgttgttgttgttccaccacttataactcttgtttttattatcttttaaaactttaagttctgggatacatgtgcagcatgtgtgggtttgttacataggtcaacatgtgccatggtggttgctgcatctaccaacccgtcacctggtgttaagcccygcatgcattagctatttaacctgatgctctccttctccccacctcctcgacaggccccagtgaaacgggagctcccttgaccacttcgctggcaggaactgaagctgctagttttactcagcccactgctggccactccccacgggarggagcgkkcaaggaaacgggtgtgggaaccggagtgaaggaamactggaactgctggctgcttctctscagcagaagcaggccctgtgcatgccccatggcagcgtccaagtgtgttacaatgctcttttagccttgccatccacagacagcttaagtgtyagccagctcagtgaagagtcagtgtgacagcctttttgggtttccacacccagtgcctcctgaattcttgtctggcatccaggaagaatcaggtcacacaaatggattgaagggtagtgtgtgcagaggattttattgggtgatgaaagtggatctcagcaggatggggagctggaaagggaatggagtgggaagataatcttcccttggagtaaggctgtccctggccaaacttctccccaacctagtctccgatgtccagctgcctcttgtcctctccacgttcagacacttctctcctcttctctcctgttctctgctctkccgctctgctgctcttctgctcatggagcgtggggtttggggttcttatgggcacaggatagggtgcagggcaggtcagagtggttttggaaaaggcaacatytgggcacaaaaacaagcatgcctattctcatttaaggccatgggtccaggcttgagagtagaaccctcaccagggacccttccctcctgcytcctgtccatatcaccagtgtgtattgttccctgtgtccatgtgttctcattgttcagctccctcttgtaagtgagaacatgtggtgtttggttttctgttcctgtgtgtgtttgctgaggataatgacatggacaaagctgaaagattggaggattttaaactccaaagggaatcttatctttgttatccttaactgaaaaatatttgccttttttatgtaggggaaaattattattaaatgttttgaactttgcttatttggaccactgtttctgccaataaagttttgagctgacttacaaaaacagagtacaacacatttatttttactgtaagtgagaaattgaggctgaagraaaatacctgggaaattccatgggtggtctgtgtatataagattcagaataaaagtaaatagaatgtaaaaatttcaacctcagtaaagttgaaagaacagttcagtgatcacctgtttatctctcattgagattcattaactttgacatcttgatatatctgtgccgtgtctctgtagacacttcctttgtgccaaaccmtctaacaaacagtagtctgctgcagatgttaggatgctttactcctaaataattcagcttgcattttccaagaataaggaaacattcctacacaactaaccccatttactgcacccaagaaaattcacattagttcagtaatatcatattttccrtattcagattttctcaatttgctttctcagttggctttttttcctccatgacacagatccagtcaaggttcctaaattgcttttggttattcataaattaataaattgcatttggttattaaatattttaaaatatatatcaattgtctaactcccttggatattcatgacattaaattatttgaagattccaagccatatggcccatgcarcagcctactatcttgatccatctcattgttttctcctgattcggttcatttaaaccatttttggcaaggacaccaaataggttatgttgtccccttgcctctgcatcagtacatcctgtcaggctattggcatcactaatgacaatgccaagtttcaccatttggttagttgatgactgccagattaccccactgtaaaagacacagtttttttctttttaattattatatagtggggtgataatgcagttcaccattcatctgaaattcaaagacaaagctgaatttattgtaaaggagaactatgctggtcgagttcagtctgagtagaccaaagtggaaagtatrgagttaagtagattttcagaagtaagtaagctgacatatgtrgaaacatgttgattcaggtgaggagtggggcaggttgcttaattggcacttagagatgtatgagtctgttgctgactggctgtcttttagcaataaagggctgttactgattggttgactagaaagtgccaattaaatagactttaatctgattcaggatgctacttattaccatggctacatatcagtcaatcttttcctaggtttgctgtgacttgaattaatagacatgtcttgttccacaataagatttcccctaattgtttgttttagcatttrttggtgattctggcttgagtcatttataatatgggatatataagatgttagctttctatttttgtcgttctttcaacatatatttacagacattattctgtaaggaagaactttacctctcctcaatttttttagcccctttttgtctgttgctgtttctctctcatctagtaaactgagatcacttttaattcaaggtgttagaatccatttattatatcattttgattaaatttgcccaatttgacagcagaagtccctttattcagatgtctctgcccttttgagataaccctatttatctataagctgtcctcatttcctggcataacatactttccctgcttcagatctggaattagctatatggttcatttaaatagaagataattagaaaccaagatctgggcattaagtgtgctcatggctactcaggtgacattgtttctaggcccttctgttagaaaggactggaaaatatgtatacatatattttaaatcatggattgatgctgatacctccattaaaatccagcactatgggggtgcttcctctcattttatgtttatttttctcttctatttattctaagaccctatagtaccctcaaaataatttcagaattttaacatcaaaatttccaaatttttgattaaagataaatggtctgagttgaaagtgtctttagagataccttagatttttctctagttatagcttgattgtcttaaaacacataaagcgatgtttgtctgtgtagaaggagacattctgaagggtgtcgaccatttctgtatagctcagtactgatggaattggcataatggtggtaattataggtaatatttattgaaggattagtatatctccagcaccattctcagtacsatacatattttctctgttaatccttgtgaaaaccctttaagatagttaatattatcattttaatttcactgatggataaccttatgcaaagtctcmctgaaagtaatgggcagacatgagactcacacctaggcattctgatgatagagtttagattcttgaccactctgctgtacatgtgttttacgtttttaataataaaatagctactcattattacctgcatttcccccatcatcagaacacttttcacccccttactggaatttattcttggtttgtcattaacattagatgtaagacctccgaggttagagactatgattctattatrtactattgaatttacaacatatactacattatatggtgcataaatgcacttactggatttttaataatggcactatagtcattcctatgtgccattgtgctaaaaccttaaatttaaatttaatattttggattcgtaattgtacaaattaggtatttctatattgtgtgtgtggggggaggtgggggagcaggttcaagaaggtaacatgattgcccacagcccttcagctagtaaataccagagacttgaactcacatctctgtcttggaagcctggtctttatcgtctcccatgagatctcattttctaatgaaattcttcctagtccatctagtcgatgctgaccctagtggaaggatacatatttgactagcttcacaaaaaatgagataaaaggccaaataggtccattatactcagcagatgctccattcaaattcaaggcctagaaatgatatgtagaagagagaatacttcttagggggtcctaaaattcctaaaggaaaacaaaaatgaatcatggccgtttaaactcttatagaaacttmacaataattggccttttttgggcttgcagaatatgtgaaattggatctgaattgcaggtgaattgcaaagtgcagctgttacccatcaatcctggcttaactatgcttggttttcagtgctgttctagttttccccactcgccaagatggccagctcaggcattgggtttccttttgctaccattggtttcctgtgttcttcatacctgacctttgttttatgaattccacagtatgttgctactgaagctgacattttattcattttccagagacaaaaataaagatggcaaaataagagtactagtaactctgggatgggcgctctttgtagtcaacctcaccaagctgtaggctgaagctgctagggtttgtatcactcattggaatctctgtgaatgataatgttggcaaaggttgagacggtagcaaggtttctttaccaggtacgtgatgtattcattgaaacaaaaaaactgtaagacaatgaaaaaatattttcttcctattccttagaaagactatatccataacgttaaagagacttattgggtagttttctctgaaaatgaaacagatcattgtcaacagaggatgaaagactagtctggattgcaagtgtagccacagaaatgtcatgtgaaggcaatatgaaaatgtaaatgtgcttagaggactaaagtggacatgctttccaagtcatctgtcacttgcgaatagcaaaatagcagatatagttaacatttcattgtaatttctaagtggtaggctaaggcaatraacaaatgttactgggctttttrcaaattccatttgagatgtgatcataggaacagtataatgaatttattaagattatgaatgtggattcagtctaacagagatgtgaatcctaattcatctrtttattatctgtgtgattttggacaacttgtcttatctgagaatcagcttctacttatgtaatagtacacaagattggaaagctatgggaagcaggtcatagactgaaatttgaaagctaagcacaaacaggcctcagaaataatagaagttggggcagctctgggtatcctggttgcggtaatgacagtctcctcaggatgctgccattgaagtgatgtagctccaaccatacatgtcctggtatcatttggaatcgccaagagtcacattcctggagcacgccatctgtttggcctgtcctggatctcttgcttggtagataaggtgttttatttgatagcctaccaggactgcttgcaatgggggagttgcaggtaccccaaaagaatttgggtgggaatataggaagagaagcttagctggtagacaccacagatatgtactatgtgggtctagagagggaatcttaaagcagtgatttgtgtctgtacatttatactatcacgttcgtctttacttcatcagccaggtgtagaattagttttttttaaaaccaaatatataggaatttggcatggtaacagctgtgtcttataattggctttttgagaagctaagctgtgatgccataagtacctactctaaagattgttgaaacacatctttgaactttaagatgtcaaagaaaacaccctcataatatacaaatctcacagatttggataagaattgatccaaataaatagaaggaatagaattcaagctagctcagagggtagtctttggcattttgaagtactttgtattatctatttttttgttttcaccttttccaaaaagatgacatagattatatggaaagagaaaaaacttgaactctccaatgaagtctaaattaatattcactcacttgtccaaagagttttcctaagattcacaagtttgacaaacatcatttatgctcacaccattattcagtaataacagtttccacctgtaactgtggtggcagggagttgaaattacctaccattatgggttattttcaagtagtcaaacctaattgataaattaagtcaaattcataatccagagacattatttcttagattccttctttattgtaagatctatcgcttcatggatagtagtactatagaacatccttctttttctaacatgcaatactgtattcacagtgctgatcttgctggttttacttcctaaatttcacaaatctatctatttctctaatttctaatgccagtgccctaatccaagccaccagcattcctcactcagcttatttattgtcttcactctacattccctgcaatacattctccatgtagctagcagtcagagctttatcaaacacaaactgatgaagaactccttactttatccccattgaaaaacctttgtcattctgctataaagacacatgcatgcatatgttcaccgaagcactattcacaatagcaaagatatagaatcaacctaaatgctcatcagtggtagactggataaagaaaatgttgtacatatacaccatggaatactatgcagccataaaaagaatgaaatcatgtcctttacaaggacatggatggagctggaggccattgtctttagcaaactaatgcaggaacaggaaagcaaataccacatgttctcacttataagtgggagttaaatgatgagaacacaaggacatatgggccgaggaaacaatgtatactggggcttatcagagggtggaagatggaaggagggagaggatcaggaaaaataactaacgggtactagacttaatacctgggtgatgaaataatctgtacaacaaaccgccatgacacgagtttacctatgtaactaacctaccctcgtacccctgagcttaaaatacaagttttgttgttgctgctgttgttgttgtaaaaaaacaaaatgaaacaaaacaaaacaaaaaacctttgctagcttcctttcgtacataggataaagaccctagcttttaaaacatggcctttaaaggcctctggtcttgcttcagtctttctctctaatctcaccacatgccaggcctccctctttctttcatgcccagccatactagcctctttcattcctccaccaaatcgtgtttcctttagccataggcctttgcatgttgtttctctcttgactggaatgtttttgcattgtctttttaccttgctaactcctgttcattctaccaatgccaactcacgtatcccttcttctagaagggctcttttgaaacctcagtcttggccactttcctttattatatgttctaatggaaccacatttctttccttgatagcatttacttgtttgtaattcacatgtgctagaatgatggtgcaatttccattttcttcctctagactatgagagcaggggcagtatatgcttttttttcactatagtaacttcagcactatgttttacacacactaaatcacaatttattaaatgaagtaattaagacttagggatagtatatccgtcagtttttatggggcaacaacctggaatcttggtagtttacaacaacatcattcattcttgttcacaaatctgcaggtcagctgtggctctgctggtcttggctgggctcagctggctttgggtctgctccattgtcttctcattccatttacgcaggctgaagaagcagcccctatctggaacattttgctcctatggtagagggcaggaggttagaaggccaacccagaccacacacatacgtttaaagcttcctttgggagggccrtgtgttatatccacttgtgatccattggccaaagcacatcacatgaccatcttgaaatcagtaaagcaaagtagtatactcctcccacgatgtaggagaagaggagaataaatatttgtgaagaaaatggtgccatctactatagatagtaaacacacttgtccgagattttcagacaaatgattatctgccttgtgtactgactctaaaaccgtggatttgccaaacacaatctctgtaatatagataatatatgataaataatttctccaaaggcaccagtgttcaggagttgcagtttacaaaattagctttatacttgttgctacagatcctatggaatacatccatcccttcccacctaccctccaccctcaaagtaccatgtgaaaaatagacatcaaccatgtgtgctatgtaaccagtgtttgtggactccttcattagtgcctaccatataaaaagaactgtaaaataacatggaaagctcaattatattgtctgtgagaaatcatgggaaaagactattaaattttcacattttactcatggctttgttgattaattgaaagaaaataagactaatgataaagttggtcatatttatgaaattgccacaaaatgaggagtcatcaaaccagacttttacaaatggcctaatagtttcttctacaaaaagcagaggtgggttggcatgaggaggccatatttggtaactgtggggttaatgttaccaaattcaagcttattaacattagaagaatgatgataatatagaagttgtcagaatttggaaagaggttttgtccgttggatgaaagaatgccattgcaatacyaatggatgccaatgggatagcagraatctaagagtttrtcaacatcttggccaagataatcagcaggggatttgggcagctytctgggatttaccacatgaaaaatagcaatcaaaaacrgagcccaaataatatgtattcccaattcatagtctgattatcataaaatatgctggaagaaaccttggaggatgatctcctccagatgggaagcaaaggtgaaaagtgtaaatatgagagagaatgtgcgtctgtattagttacaaacggcttaaaaatatttctgtaactttgtcataagatgttttaaaagaagttttagggaaaattttctttctaataactaacatatcttttctatgaggcttttatatttagtaataacagctaccacttatttaattctgacttaatggccctttayacagatgctgaaagaagcctaggggtatggaagtaagctgtccacactcacccacctagtaagtagtgaagtcccaatataaatgagaccatcctaattgcaaaaatcatttycttaactacttagccatagcagaggcctrgaaccagtcttgtttaggtagatgacctggtttagccttttatctattaaaataaaggaaggaaaaaaagtagtgggtttcagatagatttctgcccattattttgtttttttctgtttttacagctcatgatctaaataggaaaaaaaatacatctttgacaaatgtccaaaatagttctgacaaaacttttggggtgatagtgggcagggaagcaggtattccccttgtcccctgggacctgttggtttttcttgatgttgtcatgctgacgtatagcagtttgacttccactttgaacttaaaggtcagaatttgtgctttcagactattgaacataatgtagttgttcctattcctcaaactttgaaaaataattataaattaaatcactactaaatttcatttccacattgggcttactaccgggcagaaaggctacctgtgtagctaacagttacatgaccttaaggaaacattttatccttctcacaattaaaaaatcacatatttctaaagcatattttcttttgaattaattattttcttattttgttaatcactttctcctttggagctgcggttgaatacagcctgtccactatcgctgaagctctcaaagcttcatgagactccttcratcaatatattgtatttggcagttcacgttttactatgttatacaattatatttaacaaattactgtgatgtgaaacatttgggttagaataataaataactttaaactacttactaagcagctttgttgaaccaaaaaaaaaatttttttttttttgagacggggtctcgttctgtcgccaggctggagtgcagtggagatcttggctcactgcaacctccaactcccaggttcaagtgattctcctgcctcagcctcccgagtagctgggattacaggcgcgtgccaccatgcccagctaatttttgtatttttagtagagacggggtttcaccatgttggccaggatggtctcgatctcctgacckcatgatctgcccgcctcggcckcccaaagtgctgggattacaggcgtgaggcacgctgcccggccaaaaaatctttttaagtgtgactgacattggtggctatcaatatggttggatgcttatatttwgagaatatacttcacaattctttttttctggtcatttgagctatgtggtcatttatctgtgtagtaaaattaacgtcactttgtgatataatctggtgatacgtaaaakaaggcttwtttgctctttcttaaaatcaatactgcatgtatttattataaataaaatgagcaagaatttaatactgttaatttttttcatgcacaaaagtatgaagtaaaaagactcataatcctactgcccagagataatccctgttaatcttttaaaatgttttgttttcttccatcttctccaaaacagttttagataaaactagaacacaacactactctacatatagtatgatatccctttcttttgrtcctaataccgtaagttttttcttattgtttaaagttaatgtttcttattcattaacttcattttcagtggtttcataatatttcatcaatwtgattaactataattatttcacctggttttgaatatttagtttgtttcataactttcactattagaagtcatgccacaaccaatataaaatgtatgtgcccatacatttatcagttatttatattactgtatattacatgcatacacactcagtaattgtwggagtgaagtattcaaagaaaactgagacatagcatctttgctatcataggccttcttggataaggtacmtacacataaattatgtaaatgtyatgataataaatgtttgagatctcaatgagtggacatacaayaraatttcacatgtacccaaaagcaaagtggaaaaacattttgctactactcattgaatagtaataattttcctaatatatgctaattttataagtgagaatgtattatgctaatttgcattatttgattactagctaagaattattgagcattactatattttaaagttattttactgatgaagaaattgaggctcagataggtaagcagtttgaccaaagtcacacaactaaggaagagaacctrgaactgatcacatgtttttctgattctgacacctatgttcttaaccaatacagcataaatgtagtttcrttgttttgttgcttctgagaagcattccaattttcttaatattcagtattcagctacagtaccrtcaagtattactaatgtgtcacagtcaccatctaaataggagtaactaagttctggatgtgttttttctaacctttcaccaagtgaatttctaaggcttgaccatcttcctttctgccattttgatttttttataatagcatttttgatatatacttcacacaccgtgcaattcaccaatttaaagtgattttaatggcttttactatagtcatagtgttgtcgtcagccctcatgactacagacggttttgtcactgccattgggtttaggatctagctgtctgttctattgagtgcttaacacaatgtctggtacatggtaggcaataaataaaaaattatcaaatgattaaacaagatctttttatgatgcctgacattattgtgctaagcactgggggagttgctgacactctgtcctctagaactttgcaggatccttggagggttaagacctaaacccgcaagaaaagtaacttccgagtgaagtgtttgattagatgtcaaatgaggagaccagccaatgatttttattactgatgccacaggaagataaagagaatgctgtgccgtgcaaggtcattcaggacagctccttggagacaggggcttcttactggttcagttcatggtggcccaggtcttcctctatgaccactgagatgcaatgacttttggccagctttcaaagccttagtaatctttcccaggctgctgggattaataacttagaaggccatagttcttgctttactcttcctgtgttctaagatcttagrtcttaactgagagaagaacaaggtcctgggacacctctagagtgtgataactactatcactttttgtacttcctgcctcctctaytggatccaaagaaggcaatttttcacatcactgacaacctagacccccttgattgcttctttctctgaaatcttgttgcatgtctactcrtcggtctctcagtcatgggtcattgtatcatttgtttacatcatttatgcrtatgctgcttatcaaagaaccgcctggatggcaaagatgccacattttagcttttctttgagtacttcactcctacaagtactgagtgcgtaatatgcatgtgtatgcacgtaatatacagtaatatgaataactccaagtaaaacacacagtatcacttcgttacatttccaatagaggaaagtagtggttccaaaagttgatagctacttggtatttcttaatgtggatatatgatctcttgatctaaaataacagatttctaaaggaccgagcatcacctagggtgtttgttaaaatggagattccggactctgccatgatttctcactctaaggattctgaattcaaaagttgagcgtaggagccaggaartggaactcaaaacaaaaagccagccactcccaaataattgtgacttccatctgtgagtcaactgtragaggcattagcttagaccgtcaagatttggagaaataatatgcatcggttagtcataattggaaragctggcgtaaatgtgggttagtttggatcytttaaaagaaaaaatatctatagaactgagtattacaggggatagtattgcaactctgggagtctgtgactcaaattactgtttaaattttgtgtttatgtatctttgtaactcaaataagataaatagtggctacctacaacgagttatcaaaaaacattaaacgtatattgaaatctggctccttggatcatattacttcaagtcatccctgaaaaatgttggtgagaaatggtttctcagcctattttacagaatggcttgttctcaggtgagtgaatcagttttttgcccactaatttcacagattagcctgttagtccctctggctgaaagagtcaagttcacttcaattcagttcaacagatcttgactgttacttgctattaggttgggatggaaaagcaattgaggtttttgccattacttttattgtgaaaactgcagttacttttgcaccaaccgaatatgtgccaagccctgtgttagccaccggatataatgttttyttccaaaaagaagccaatcaaggcttgtatagtacttaccaggggccaggcactgtgttagytctttatgatttcagccagctgacctaatgaatagagcaccaatacaattttttttttttttttttttttttttagatggatgctcactctgtcacccaggctggagtgcagtggggtgatcttggctcactgcaacctctgcctcccgggttcaagcaattctcctgcctcagcctccctagtagctaggattacaggggtgcaccaccacaccctactaattttttttgtatttttagtagagatggggttttaccatgttgaccaggctggtctcaaactcctgacctcaaatgatccacccaccttggcctcctaaagtgctgggattacaggcgtgagccaccgtgcccagccacagcaccaatacaactcttgctaggtgatgcttacagttttaaaggagctttcttttgggccatagaattttaatctaaaagtgtttgaataaaaacacacaatggaccagaactcctttaaaagcaatgactgtactttattttatttatttgagaacatatactgtgtagtagaccaggagctagcaaactttttctgtaaatcttttctgggccatgtggtctctgttgtaactacaccactaggccattctagtgtgaaagcaacatcatcaattggtaaacgggcaaacagggctgtgttccaataaaactttatttacaaaaataggtatcaggcaggtttggctctagggccgtcatttgctgacctcaaattagacacagagttgtctattgtaaatgaatgaatatgtaaatttatcatttaattagtttctgctatgtgccagaccccaggtatacaataatgaatagtcagataacgatcctacttttattcttgtgtgcagaggtttaccataaaagatgaaacccataaatgtaaacccataaatcacaaacaacatgattttctattctgaataaaataaaaagaagagtatgattgagagtgagggactgcttgagacagagtggtagggaagtcttctctttgccggtgacacgtgctgtaagaactaacgaggagggaccagcccattgtgggacaatgggcagccaagtccaggtagaaggaaacaagaacaaaggctcaggggcagaaacaagtttgcatgctcaataatgtttaaaaaaacacagagaggccgggcgcggtggctcatgcctgtaatcccaggactttgggaggccgaggcgggcggatcacgaggtcaggagatcaaggccacggtgaaaccccgtctctactaaagatacaaaatattagccgggtgcggtggcgggcacttatagtcccagctactcgggaggctgaggcaggagagtcgcgtgaacccgggaggaggagcttaaagtgagccgagatctcgccactgccctccagcctgggcgacagagcgagactccgtttcaaamacacgaagacctgtgggggtgaagcatggtgaggaagtgggaagatgctaggagtctggaaccagattaataaggccttctaaggacttcatttttgtgcagcaataaagctttggtgagatttaagaaaaagcagaagggtggaaggaaggaaaacaggatttttaatataaacattattttgctgcaaatcatttaagtatgcccacatcataccttgctatattcaccatcccccagccccaagggtccaggtcttgtagaggctctgtagaaacagtgaatggggagtttttatccccttcaactccttggtcactcatggaatctcgaascaaagcaaacactatgaagcatttawaggaactatagttcacatctatcacgctattgctttattcttacctttaagccaatgtcaagataacacatgaagtattccagatctttgttaaaagttcctggaatattttgttattcacaaaacattttacagcaacaaccaattaacaatacccttagaaaatcttggggctttttcttgagtttaaccacttttattttttttttaagttgagcttaaatttggtgtaaaagtgtrtacagattaaatatctttgaagtaggtttttatttcacaggtcctagaatcaggtaaaatggtagttgctggtttcatttgaaggagtaattaaggtgtgtgatgttgtttaactgtttgttcaactttgcctagtgcagtggagtacaaatatttgaccttcttgacaaagacagatggattgaagctacacaccatgatatcattaggttgtcgaataacatcattattcatgattataaggaattattcaggtgaaatagcaaacctaatagaaagctattatttgtgttgggagtataatttcactgtccttgtcgttcccaacccttagttgaagatacaatatgtgtgtttattttcttataaggaatcattaatagcataatttaaactagtaaaattataattaataatttagtaaatcagggggtataacatacttccagaaagaagttagtatgctataaatgtaacaaatgaacattttcatcatttattgaattgtttcatttatataaattcatttttggtagtacaaaatttttacactgattaaaacatacataaaactttactttcaaagattggaggaaatgccttaaatttaaaatagtatttaaactggttgcatttttgctgtccatcttggtgttggcgaaactatggcttggagccaagtctagctccctgcctgtttctgtaactaaaggtttattggaacacagccacatttgttcctttatgtatcctctatggctgtttttgtgttacagtgacacagatgagtagctgtgacagagaccatatggcctgcaaagcccaaaatatttactatcttgccctttacagaaaaagtttgccatcctctgcactaaggaactaaaggaaaaaataaaattatgcactggttgatctcaaagttgtttgtaggaactactgaaacccatgaggttgggagaaatcagcatcctaagccatgtacttaaggaagcatgatggggtgtgtgatgcaagcccactgttctagatcatcagcttcttcagagaattgcctggaattattatgatctgctatataaccaggaaaggacggaattagctttctctgagctggttttagaatgttcttgcctgaaactgtaataatgaaatgatcctgtgatcctggatraatcctgggttcttccacagtcttccttttatagctctgtgtagaacaaacactgaaaaaaagtgcaaatacgtttgatcgtgagtgtgagaatattgtttttccaaagatatatttatagaaataggctaataaaagaattatgtaattttcatcaaatttagaaattaactgtgtttgtttgcagaatgatttttatatttttgaactgattaaagagatatttcaaatataagaatgtacaaagaataatgtggcagtccttcttaaaaaatttaacatattttcatacatgcttcagatcttttcttagaatgaaaagttatagatacacttcatcttccccacctgtcatcttattctccttcctctgtttttagggctgcctttctcaaccttgtaaccattgccattttggaccagataactactttcttgtgggggctgtcctgtgcactgtaagtgtttagcagcaactctacctgtaccgaccagatacaataccatgccccctcctagttgtgaataacaaagaatatctccacatattgccacatgtgggaggcaaagttacccccttttgagaactgctttagaggcgtttactgacctgaagttggtaggttttctacctgcttaggtttgcatgtttttttttgttttttgtttttatttgtttttaatgtgcatctgtatccctaaaaaggaaatcatgttgtttgatgtatttaatattttcttgactgtgtcctgctgtacataatcagtttcttttactcggcattgtttttgagatacagctacatgrataaatgaagccctcattctttcatttttacctcctgtattgtattctagtccctgagtggaagacaaattaatttcctattcctttttaaaggttgtttctaatttttctcagttaagacgatgtaaaaccaatatctttgtatgtgtttcctagtgtactggtgagtctctctgtagaatatttacctagcagtggaatcaccatgttgtaaggtacacatttctccaacattggagagcagttctatagtcctaattaagtgcttgtgtcagttgatactmcatagcattgggtgaaaacatctgtttcccatgatgtttgcattggcacactttttaagtgtttgccactctggtgggtaaaagatggtaccacattattggattaattctcatttctccaattatccagtggagtaaaacgtttgctcctggatgcaaacaggtgtccctttttgtcaattgcttgtgtgtattctttgccaattttttccattgggtcattgttttcttttgcaataattagtatttttatatattctagatttaaatcctttgtgatcatatccatcacaggacttttttttawttctcgcttggaatcttagtgggtttccatatgtgtgatggggtcgggacaggggatagtgcctttgatactaaaatgtttagtataatgaaatttaataatttccttttggtctatgcattttggctgtaccttaagaatatattcccagtgttaatatcataacagtactttcatatttttctaatgtattaatgttttcttttccatatgtgccttgatatcatctggatatcttttatatgtgatataaattatgaatctacttttcttcctatggaaaaacagtgttccattctattctttccccatggtcttgacataaatgtgtgaatctgtttcttgcctgtccactgagttcagttggtctctttgagctttaatgatacagtcctttgattactatgattaaagagtatctttatgtctagaaagacaagcattcctttcttttaatcacattttggctgttctttaccttgactctttcaaatgatttttttccrtcttgtcaaattctgtgggaaaaggccgtgaaattttttaaaggaatgrcattgaatacatggattcatttatggaaatttgacatactgatgctgttggatatccccagttatgaacacaatgtaggtttccccctgttaggtcttttttttaatgcatatgtagaatcaagttccaatgtcaataatggcttggatttttaatttaaatggatatttgtcactgcctttttaatttggaaaaatctgggagtaaaaactcatatttgtttacctcataaacaataaacacaaagccccataaactttttggaatagttttgggaaaagaaaaatagaaaacagttgggaaatgaagtacttgaccatttcttctttaagagtattcccttaaagaagaattagagaatgtatttgttagaatgtacttgaagcatttgcttatgaaagaaaccatacactaaaaatagctaacaggcatatgaaaaggtgctcaacatccttcatcatcaaagaaatgcaaatcmgaactacaacgagatatcatctcactccagttaaaatggcttatatccaaaagacagayagtaacaaatgctggcggggatgtagagaaaagggaacccttgtaccctgttggtgggaatgtaaattagtacagccactaaggagaacagtttggaggttactcagaaaactaaaagtagagctaacacacagtccagacatcccactgttggatatatacccaaaggaagtcagtatatcacagagcgatctgcrctcccgtgtttgttgcagcactgttcacaatagtcaagatttggaagcaacctaagtgtccatcggcagaggaatggatttaaaaaatgtggtacttaatcacaatggagtactatttatccacaaaaamgaatgagatcatgtcatttgcaacaacatgaatggaactggaggtcattctgcgaagtgaaataagtcrggcctagaaagacaaataytgtatgttctcacttatttgtaggatctaaaaatcgaaacaattcaactaatagagrtagtaagtrgaaggagtattaccagaagctgggaaggatagttgacaggtggtgggcagggaggtgtgggtatggttaatgagtacaaaaaaatagaaaacatgaataagacctagtatttgatagcgcaacggagtgactgtagtcartaatgatttaattgtacattttgaaataactaagagtataatttgattgtttgtaacacaaaggataaatgcttgaggggatggataccccattttacatgatgtgattattacacattgcatgtctgtatcaaaacatgtcatgtaccccataaatatatacaactatgtacctacaaaaataaaaattaaaactatacactaaaagtcgcatattatgtgatacaatttaygtgaaatatccagaattggcaaagtcatagaggtagcagattagtggtaccaggggttaggaktgggtagtggggaatgtasaatggctgtaatggccacagagttttcttttgggatgatgaaaacattctggaaacagatatggtgaaagttgcatgacattgtgaatgtacaaaatgccactgaattttacactttaaaatgattgatgaattttgttatgtgaatgttattacaactttatgtatttgagtatatgtcatttattaatggacaaagatacattctgtaatttgtctacctccctcttgatctgaaaaaactacaaagcatgtctcaattctaatgcaaagtcttaaccaaaatgattktttctgagctattcatatttagcttctggtgactcacaggaacctgaattttatgttccattcaacactccattatgctcttaaatgagaatctaataattttcccttggaatatttttgaaatccaattctaagtatttagaattttagacacagtcgtatctctcgtttgaatattccaaatattgaactttgttcaacattgtttcaatttgcaatatttatgggttgtcaaaacaaaartagagatttttytctttatgtccrtgtctaaaaatgtcattttggaaatggcaataaaatasagcattaaactgaaattaatatcatgatgtygaasgtgtgacctaattaaaatgcaaatgtaagcacacttctttaaaatygacattgcagcttatatattccccaatagtgggactattgcttgttgataatttgatttgacaggttctcttcacaggttcatttctttaacctcacagtgtaagcatatattggcttgcctgataagatgagaaaatttaggcagattcaggaaggttaaaatgaaatttaatgagttatgatcttccttggatataggctgattctacttattagaggaatttggaaaatgcctaccatctacagatttaagcattgttgaaagtctgtattttaaacttaaaactcacgtcataggcactttttgtccttgtgtgtattgtccttaagtcaatttcatgttgtgccctttacccaaaaatacccttatttcttttactcctctaaattccagttgacctttataaagtcttcccttgcccttttctcgacaagtaagaaccattttctctgaattcttgatttgtatttctccttggcacttatccatcaattctacgctgttttataattagtgggtatacatgtactgtgtcctgttttattaggtctttaagaatgggagttactcgcccagagcaaataaagattaactggcacatagtaggaagcccaaaaggaaccagtgaagcaacagaagatagagtgaatgaataaagacacatgaatgcactaaatcttttgtgcacatggcttttactgattttcacctgtaatgtcctataaggctatagacagtcaaactaaaaaattgctgtcattgggagagaggcgggtggatcacctgaggtcaggagttcaagaccagcctgaccaacatggagaaaccccgtctctactaaaaatacmaaaattagccaggcatgatggtgggcgcctgtaatctcaattacttgggagactgaggcaggmgaatcgcttgaacctgggaggtggcggttgcagtgagccgagatcacaccattgcactccagcctgggcaacagagtgagactccatctcaaaaaaaaaaaaaaaatgccatctttcattctttaatagtgattattgcacatttactagtttatgaagccaattcttgcaccttaagaagtatttatgacctagatttcttaacctttttcctatatatccaaatctttcaattaactctgaaggatgagtgtaattttaaataccaaattctaatgctcaaatgtgagaaacaattatttgactttgtgaccacagaaagacatcaatattttaaatgctgaatgtttgtattttcagatagctactgttgtcttgcagttatgttgcctgttccttccacataagcatcatatagtaaaatttagttttagtaaagaatctgtgggaaaagtagacttgaacacaataggatttttaaagattatgtgaacaagtgagtggaaataggatacttaagaaatacaacacattaattttcaagaatatttatgtccgagatgtcaacattccaccaggatagtttttggaggataatagctctgagcgagattgtttcacataaacgaggttagaaagttctttatttgaaatgaaatggaagattttatgctagccaaacatgtaatgctactttaagcaaacttttcatattctaaatacaaatattaaatcaaatattgttataatggaacatttcattgtgtttctgttgtaaaaaaaaatttaaggaaataaataacaacataaagacaaaattggtrgcctaccccaaatatttcagttatttgtgtaaaggttttcttatcttcactagstgatggttataaaatgaaatgcgtttaaatccatggctaaaaatgattaaaatatcatacagaacgaaagcactccagctgtagatgttcattaaattgaccattaataacttgtgatataaaggaatattactgcattcataaattttgtatgcagattttattaagctggcatgttatatgaattgattgtctgacatcttctggctgtggctgaagataatagtgttttatatgcatttttcataatccaagaattctgatggactgtttctaggtagttattatgtttttgttctggttggccttttttttttcacccagtttacaattagaaaatataattgtagcttttcgtatgaaacattataaggttggttgtgtcagcatttctattataaccctgtttttcatagggctgctagtatgtgtgtaagggagtgggtgtgtggagagagaaactacatcggtttggttgactctattttgtcttgctaatgaattattgccatttctttcttgaaatgtaaatagacttgtttgctattgcttaataaaaatcatatttcagtagcttattgtttacctttcagatctgagcttatttaataggtcttttaacctgtttctaatgcacaactcagcaccatttggttttgtgggtttggtactgcaaggagggcttgagtgcaacatatactttttgggttaccagatctagtttatttgcttctcagcatatcatacttttattttgcaattaccttttgtcttcagaggtagaggaaaggtagcacaaaggtcaaagcatsgaccagactgccttagttaggggcccaaattggctacctgtgcaagttacttaacatctttatacctgtatcctcacctgcaaagtagcatgatgctactatctaccctgtagggttgttttgggaatttgttaaatcatgtgaagggcttagagcaaaataagcactcagtaaataccaactgtttttagtacctgaattagtaagagacagaagacgtgaaactgaaatctaatcttttttttttttttttggtacaaatcaagtaagacatgataatgaaattactgcctgaatctttgaggctgctttggatatagtttatcccctgaatttcctccatgttgaagtctgtggagacggagcaagaggtttaaaagagacacctgggctggagtagttacagttttggattggggaaaataaatttaagccttctcacttttgtaaaatggagataattatggtaaataaataataggttgttatatattttttaaaaagcaaaatggaatgtctagcacacatacgagttcagtagctatagtgtctctgtggtacctataacagatgtgcacagaacccataacacattttgttaactaaggtgagagtttattttgaagcagtaaygatgtctaatgtaacatctttttaactaccttctactagatgttatgaaaatattagatgatcacccttgtcttggctttataaacacaaacagtgtaagattagattaaaccatgtttgtggcttataaaaacattatggatatttatcatctttgcctgtgattaccgaattgctagtagaatattgtttcttggtgttgatttgtttaattccgagttacagcactttgccatgtccctgtattttgaaattcattgctcattttggtcaaaagtagccttgttaaatgtgaaagctgtaaggatgatttcctgcctgtcatgtcgtacatgaagagcactgaggtacagtttataacagaacttggagtaataaaaactccaagcagatgacttggtttggagcytcctgttcagtgcctgggaaacttgaaggatttcttcatactttttggccatttgtgagtatggcagtcttttggctatgaaaacaggcasaggccctcctgccaaaactgaaaaagacattagggtgagcctaatgaaacctaggcagagatccccaaaaattaccacattgactgctgtttcttttgcaataatagttcaaaaacttgttattctaatttagatgtgcagagaatctttatctaaagcaggcagatgttcttattggtattgtagtgagcagtagcatggtgtaagcaggtgtgagtgataagtggacttgagcacaggtggctttaatgtatgyagggtcaatgctataggctccttaggccaaacagttgtmagctagattctagagcactccagcttggtcttagtcatgatgtctttaattcagtgggcttttaaaaatttaaactttgttaaaaggagtttaagttatgctccattaagttggacattattggaagccaggattttgttgctttctcagaaataaaaagtatacacacacattttaaaatgagatcatatgtacatttctgtgccctctaaaggagatttgccacctctgtgaattgcaacttgagctggatttttaaaaatttccaattaggattgatgcctctgagtaaaacraataggtactattatgttagaactctgtttctattatagagagaaataataatagtatttgcttaaagggggataatatttttctaatgaatgctatttattaaatattgtgacaaaatgtctactttttagcactgctcatggtctctcttggaaatcccaactcattggacatcatctggttcaatccttgacccatgatggaaatctctgtagcagaaagtgtggaatatatgaattaaaactgaaaagggattccaaaaggtggaatagattttgttcatttgcagtcattgaaattattcagcaaaatattatagtttcatgttttacataaaaacttaacaccaagtttttatcttgattttccttctggctgttagataactggtctttctctcaatctattgaacttgatagagaaagttagataattctatagcatattatttagctggagagctgcctgaatatagggcttggacttaaatatttatgtatactaggcaacataggactgctgaggttctgtttagtcacactggtaattaaaakattgaaatatttctattgtacatagctattgctctgagaatatcccctaccctgctgtcataggccctccctcatggcccccagacctttctaagcaaccacagaaccaatgtctagatcctcaagaccccgctccagtgacactgtcagcttctaggtaaccyaccttttacttaacatgacttctgaatagtcctacagtgactgttggttgagtaaatacagggttacttggaatcagatacaagagaaaagtatcttgaagccctgttaagaggttttctaaacttcagaatcgaaggtaaacaccaaatcacagcatacatgagccaggcctacaataatgctatggtgcctggaacacactaggaacataacaggggctcagtaaatatgtcgatggaccgagcatctcaaatataatcttttagctcartcacaggagtcgagtgattgtttagcaggtccctgctrctgtggtttcctcatcatttaacaaaggtttatatttaaatcgtaagaccattgcacttccctttatgctttaagtagctgcacgggccttgtcaggattttcttttttagccttgccttccttcatagaacatctgcatttggatcacagaatgttggcttcacagatggtcttgtaaatagctgaataaagaacctttaatacttggcatttataacaggtacttagaagwttcatcgaaattctatttgctttggctggagaaatacattctcttggtaatgaacttgaactctgtcacctggttatatctttgagataacagaataggatagacggaattaggaggaaagattgctgtataaataggtgagcattaaagacttcatcatctctgacttgtcaaggaatgagctaaactcaggactyactattttgtatgattaaaatgtgatgatgaagtgttttgaatttctgataggcttatttccctgcgttagcaactttgagatagtcaggcactgcaggaagctccaagcacggagtaattgaaaggcaagttcaagatagattacattcagcctgttgaagtatacataactgtacctattaattgctgcaccaaagatctgcattttgttcaaaccatcttgaaagaatgtgacttcggagatgagccttccaggtgtcgtagagcagaatgtagaagtctctcaattgttgctttcatggatggatcccctacttggataatatttccacatttgatgtttctgactttgagcagtaatcacacttaagaagaatgataattgtgcaactgcaggagcctgcctgagtaagtttctcattctaccttaaggagcttcckagasctgctcagtgtgttcttgsttatgctttccttcacgaggctcttacatttgtgcccacstgctgggtacagagacagcaatgggagtgtagagcagcactttaacttgcctagtgaagtytcttactcagtcccttactagccagsttcttgcgatcaagtcaccaaacctttctgcagattgtgatgactattcgattcaatcaaacccaaakagatcagccaagagtctggcacacagaaattccttaacaaatattagttsttatgtatcstacaccttgtgtttatagcaagccagtctgcttgtggcagggttrcttagaaatcatttgacagtgtctaaacagtcactcycaaagttgttgaaaaattgacartctgtagttgcattttgtaatgtttcttttagagcaatagggcagtggttttaactgaagcacgtttaaactgactttgttttgagaaattttagtggcattactaagaatttttggatcaaagatcacgtttattggtgagaggatatccgttgaaagataaaatatrcattataacatgtctttttgataaggagaagtgttttggctttgttcatcaaaagtacatctttgaagctkatatttgaagttattaagatttactagcatctggaatattaccttcrataattaatggaggagacatcagagcctgcccttctctgacctatagatctttagctatcagtgaaagaactgatggtatgcaatgctttctttgcctaacctgtcaggyccctttggaggtatcctaaatttgctgatggatcctaaactgactgattaatgtttgatgttaggagctttggggaattgttcaagggattatggttgtttgtagtgcacaggaaatacagactttttatgatcagttcagctctytttgtgatcctctattttatgactagataatgcttttgtgaaaaaagaatgaagtacatctgacatatggcttgatctttctcttcctctaattaaaaaacaaaaacaaaataaaatttttyattggaaattctagccctgaattacctgttttctattattgtttatatactctctcattttaagtgttgtgtaaatatttactgtatcctctatcaaattgaggaaatggtgtctttttcagttcctattagagtggacagcatakattagttagtagaaataggcattgtgaggaggcttttctgtaacaggtgtgcagaagtgtcttctataatgtgccacttcatgctgatcaatatagtcttagacaaatgactattgatagggaaactgttctttgaaataaccatatctttgactccaaagtagacttttcatttattttttctctgatctcactgcaattagtaattagtaattataggttggggtctgtatatgaaaagatgaacaatccgtgggtccttaattattcaaggaatttcaaggtgtttgattctagagagttgtccatttctttatttaaaaaaaattttactttagattccaggatacacgtgcagaacatgcaggtttgttacataggtatacgtgtgccatggtggtttgctgcacctattgacctgttgtctaagttccctccccttgccccccacccccaacaggccttggtgtgtgttgttcccctccctgtgtccatgtattctcattgttcagctcccacttatgagtgagaacatgtggtgtttggttttctgttctttgttagtttgctgaggatgatggcttccagcttcttccatgtccctgcaaaggacatgatctcattcctttatatgtctgcatagtattccatggtgtatatgcaccacgttttctttatccagtctatcattgatgggcatttgagttggttctgagtctttgctattgtaaatgrcgctgcactaaacataagtgtgcatgtgtctttatagtagaatgatttatattcytttgggcatatacctggtaatgggattgctgggtcaagtggtatttctgttctagatccttgaggaatcactatactgtcttcccacagaggttgaattaatttacattcccaccaacagtgtaaaagcattctaatttctccacagcctcaccagcatctgttgtttcttggtttttcagtactcaccattctgactgacttcagatggtatctcattatggttttgatttgcatttctctgatgatcagtgatgttgagctttttttcatatgtttgttggttatgtaaatgtctccttttaagaaatgtctgttcatatcctttgcccactttttgatggggttgtttttttcttgtaaatttgtttaagttccttgtaagttctggatattagacatttgtcagatgcgtagattgcaaaaattttctcccattctgtagattgcctgttcactctgatgatagtttctttagctgtacagaagctctttagtttagttagatcccatttgtcaattttgacctttgttgcaattgcttttggcattttcrtcatgaagtctttgcccaatgstattgcctaggttttgttctacggtttttatagttttgggttttacatttaagtctttaatccatcttgagttaatttttgtataaggtgtaaggaaggggtccagtttcagttttctgcatatggctagccagttttcccagaaccatttattgaataagaaatcctttccccattgcttgtttttgtcaggtttgttgaagatcagatggttatagatgagtggttttatttctgaggcctctgttctgttccattggtctatatctctgttttgataccagtaccatgctgttttggttactgtagccttgtagtatagtttgaagccaggtagcctgatacctccagctttattctttttgcttaggattgtcttggctatacagaggtcttcatagattccatatgaaatttaaagtagtgttttctaattttgtgagggatgtcaatagtagtttgagaataacattgaatctgtaaattactttgggcagtatggccattttcatgatactgattccttctatccatgaggatggaaggttgtccaatttgttttctcttatttccttgagcagtggtttgtagttctccttgaagaggtccttcacatcccctgttagctgttttcctaggtatttattctctttgtagcaattgtgaatgggagttcattcatgatttggctctctgcttgtctattgttggtgtaaaggaatgcttgtgatttttgcacattgattttgtatcctgagactttactgaaattgcttatcagtttaaggagtttgggggctgagatgatggggttttctaaaaataaaatcatgtaatctctaaacagagacaatttaacttcctctcttcctatgcgaatactctttatttctttctcttgcctgattgccctggccagaactttcaatactatgttgaataggagtggtgagagagggtgtccttgtttgtatcagtttttaaagagaatgcttccaggttttacccattcaatatgatattagctatgggtttttcataagtagctcttattattttgagatatgtcccatcaaaacctactttattgacagtttttaacacgaagggatgttgaatattatcaaaggctttttctgcatctattgagataatcatgtggtttttgtctttggttctgtttatgtgatagattacgtttattgagttgcgtatgttgaaccaccattgaatcccaggaatgaagctgacttgatcgtggtggataagttttttgatgtgctgctagatttggtttgccagtattttacagaggattttcgcattgatgctcatcagggatattggcctacagtttcttttttcactgtgtctcctcctggttttggcatcagggtgatgctggcttcataaaatgacttagggaggagtccctgcttttcaactgtttggaatagtttcagaaggaatgacaccagttcctctttgtacctctggtagaatttggctgtgaatccatgtggccttgggctttttttggtcagtagactgttaattactgcctcaatttcagaacttattattggtctrttcaaggattcaactccttcctggtttagtcttgggagggggtatgtgtcccagaatttatccatttcttctagattttctagtttgtttgcatagaggtgtttatagtattcacttatggtagtttgtatttctgtggtgtcagtggtgatatccctattatcatttttttattgtgtgtatttgattcttctctcttttcttctttattaatctagcttgctgtctattttttatttttttcaagaaaaccagctcttgtcttcatttattttatttttggagggttttttgtgtctctatctccttcagttctgctctgatcttagttatttcttgtcttctgctggcttttggatttttttctcttgcctctctagctcttttaattgtgatgttagggtgttgatttgagatctttctagctttctgatgtgagcatttagtgctacaaattttcctcttaacactgggacactctgtgtcccggagattctgatatgttgtctctttgttctcattggtttcaaagaacttcttgatttccgccttaattccattatttacccaggattcactcaggatcatgttgttcaatttccatgtaattgtgtggttttgagtgagtttcttaatcatgagttctaatttgattgcactgtggtcctagagactgttatgatttcagttcttttgcatttgctgaggagtgttttacttcaaattatgtggtcgattttagaataatgccacgtggaactgagaagaatgtgtattctgttgcgttggggwagggagttctgtagctgtctattaggtccgcttgatccagagccctccagagctgagtttatgtcctgaatatcctcattaattttctgtcttgttgatctaatattaacagtatggtgttaaagtctcccactattattgtgtgggagtctaagtctctttgtaggtctgtaagaacttgttttatgaatctcagtgcttctgtattggttgcatacatatttagaatacttagctctccttgttcaattgttccctttaccattatgtaataaccttctttgtcttttttgatctttgttggtttaaagtttgttttgtcagagactaggactgcaagctctgctttcttttgctttctatttgcttggtaaattttcctccattcctttattttgagtctatttgtgtctttgtgtgtgagatgggtctcctgaacacagcacactgatgggtcttgactctttatccaatttgccagtctgtgtcttttaattggcgcatttaacccatttacatttaaggttcgtattgttatgtgtgaatttgatcctgtcatgatgatgctatctagttattttgcatactatttgatgcaatttcttcatagtgccattgttstttatattttggtgtgtttttgcagcagctggtacttgtttctcctttccttatttagtgcttctttcagaatctcatgcaaggcaggcctggtggtgatgaaatccctcagcatttgcttgtctggaaaggattttatttctcttatgcttatgaagtttagtttggctggatatgaaattctgggttgaaaattcttctctttaagaatgctgaatattggcccccagtctcttctggcatgtagagtttctgctgagaggtccactgttagtctcatgggattccctttgttggtgacctggcctttctctctggctgcccttaacattctttccttcatttcaaccttggagaatctgatgattatgtgtcttggggttgctcttcttctggagtatcttagtggtgttctctgaattttctgaatttgcatgttggtctgtcttgctaggttggggaagctctcctggataatatcctgaagtgtgttttccagcttgtttccgttcttcccatccccttcaggtactccaatcagttgtagattcagtctttttatgaagtcccatatttcttggaggttttgttcactcctcttcattcttttttctctagtcttgtggaactctttgggaatttccacctagatataaaaggatgtatggaaatgcctggatgtccaggcggaattctactgcaggggcagagccctcatggaaaacctctgctagggcagtacaaaggggaaatgtggggttggcacccccaaacagagtscccacacagagtccccactggggcactgcctagtggagctgtgagaagagggccaccatcctctagaccccagaatggtagatccaccaacagcttgcactgtgcacctggaaaagccaaagacactcaacgacagctgtgaaagcagccgttggggagttgggggagaggggtgtaccctgcagagtcagagaggtagagctgcccaaggccctgggatccctcttcctgcatgagcatgccctggatttgatccatggagtcagaggagatcattttggagctttaagatttaatgactgcctcactgggtttcggatttgcatgggacctgtgtccccttagttttggccaatttctctcatttgtaatgggaacayttacccaatgcctgtatatccccattgtatcttgtaagtaactaacttgtttttgagtttacaggttcctaagtggaagggacttgccttgtcttagatgagattttggatgtgaacttttgtgttaatgctagaatgagttaagactttggggaactgttgggaaggcatgattgccttttgaaatgtgcaaaggacatgagatttgagagggaccagcactggaatgatttggtttggctgtcttgccattcaaatctcctcttgaattgtaatccccagatgttgagggagagacctggagagaggtgattggatcagtttcccccatgctgttctcatgatagtgagggagttctcatgagatgtggttatttgataagtctccggactctcccctgctggttttctctctctttctctcctgccactgtgggagacataccttgctttctctttgccttctgccgtgattgtaagtttcctgaggcctccccaaccatgtggaactgtgagtcaattaagcctcttctcttcataaagtacccagtctctggtaatatctttattgcattgtgaaaatggactaatacaayatcaaccagtatagccacgtattatcattatcaagtattatgtactttacgtcagtagcccccaacctttttggcaccagggactggtttcatggaagacaattattcaacagacaggggtcatgggggatggacagttttggaatgaaactgttttacctcagatattcaggcattagttagattctcataaggagcatgcaacctagatccctcgcatgtgcaattcacaatagggttcatgcttctatcagaatctaataccgactctgatctgacaggaggtagagctcaggcagtaatgctcactcacccactgctcacctcccactgtactaacaggccacagatgggcactgatctgcagccagggggttggggacccctgctgtacctaatatgcaatacttttatatgactggcagcacaggttyatttataccagcatcactgcaaacacataagtaatgtcttgtgctatgtcattaagacagctaggatgtcactaagcaataggaattttccagatacattataatcttataggaccaccatcatatatccagtaaattgrctaaaatgtcattacgtggtgcatgactgtatatatttatgacccttcctctccctccccaaccataggttttccatgcctcttgaccattgtgttttggatcaattggtatgatagtcatctcctaggacactcaaaactttgtttctgaatatttgcaaatgcttttgggcatcactgcataacactgtaactttgatgtcagttaagggacaaagtcatattttctttcttcctttgagaatcaataatgtgatcatacttgcagagaaaggcacgtctgaaccatgggcaagcagtacattattttcaaatctcttttctccctaaggcccctcaagtctagtcctctttgacagtttcatcatgaatgttctacagtgttgctgtcctgggcaaccttagaaaagttccatggaaaacaatataattaatacagtgtcttttactggatcccatctgtaattcccagagcaatagttatattgcgtttcatttcaatagcacactctgtgctatgtggcttggatttgatatgtggtgtgattatactctctgtgtcattgggaattttgagtttgtcttttatgaatactttttctgtgccttcaacatacttttatttcatgtatttgttcatttgtgcaaaaaaatggagcaccttttatgtctaaaatgttttacaaggtaagtgaagcagcatgcaatatagtgggagaaaaaggttatatgtaatgactgtatcataatgcctggcacataaatggtggtgattttagtggcatccttaccctgctgctcttgaagctgtcatcatcatcatcatcaccaccatcaccatgatcgttactcttctcatacttytgccagatgcattctattgtttttttatgtaaagtgcactttctttgccgcaagaggcactaagaaatgacataatcatagttaggtctagagatggtaacacagtcctatcaaagcctactttgttttcagtaaatgaagttcattcatatttgcttgattccgtttcccttgaatttgttggctaggattattcccygatacattggccagcaaaagacccaggttagttaaccaattgtttggaagggccctggctgtgcagtcacactgcctgaggttaattcctggttcccaattttggtagctgtgtgaacttcctttgtctcatttcttcatctgtaagtgggatgcataaggttactgctgattattggaagaattatgtttggtagtgaaatagggcgcttatccagtgcctggcatattatgagcaatcagtatgtcaatgctgtagtttttattgttgctctaattgttgttattatttttgttagtacttttgttgcwattattattttctgctgtgaagaccaatttcctattacccagcaaagaatctccacgcttctctatggtatgcactttctccttccaggggtgagcaagcagaactcaaactagaccaagataattcacctttcattcgtactatgaacagggtgaaaaagtgttgctccctatcatattagagaagtttgggtaaaatcattataggttctgaattgatgatgatgagctctctgccctccttccaagataaaaatgtttactatggtctctacctgattcctgagacawatgcaagtttgtgttctatacatgtttatatctacatgcctataccgattgtttacatatgtatataaaaggttaagttaatcttttggcatgaaattcatctaccagaaaaataatatgtgattatttgcagtagatctaaaatgcagacattaatatgaaactttttaacagtagcactgttctcactgagctgtgtggagatctatagaaattattacatagtgtggttagtgtgatgcctggcaagagagtacacattcagtatgcataagctagtaatgatgtcagagaagacttaatagaaaacccagcaaaagaaatccaaaggcaggcataaacactcaaatcctctctctgcatctctctcaaaagaaaagtagatgatcaaaggaaaagaatgaaatattttctcatgctcttagtagccttcattttgtgtacaagccattttcctggtttttgttatattcaaggttatgtataaaaagattctgaccaggaaattgcattagaataagaactgaaaaaaaaaaatccattttgaagacctcaggtagttaaaattgttcctccttcctcaccgtgggttaatgacagacttgcttttaattcattgcttatttttgtaggaaaaaaaggtggtgattgtttgaatatgatattataatactttgcttaaaagtactgaactatattcagcatatgcatgtaaacgaaactgtatatacgtacttaaacatatacaaaccatacatatatatatatatagtttgttctgtttatggtaatgttgagctttacctgagccaagtattttggaaaatagcactaggtgaagaaatcccccaccctttgtcttctggaaaaggcttcttaaaaaaaaaaaaaatccttccccgggtgtccaggacgagaccaaatgatgctcacttaagtacctccgacaaggccagaagctgagttttcacattcccgttctgcgccttataaatggtcagctgatttgtttatacccagtgcccaaataatcaaccaaacttcagtcaggtgtgtctcgctccctaggcccttgaactttgaccatgccttcagcattgggatgcagagcagcctctccttgaatacccctcctgagaaccagctgaccttcaggagaagctttccctagtcagtgctcccagctgatctttctagccttgcttacccctccctataaaagaaaattcctttctscccaatcgttgagctacttgcacatctcatgaccagagctctccctattgcagtagtctcactccccttatagcagttactttttcaaataaagtttctcttatgtctggatttggttttaactggacgtttgcgtttattccccctgtggcctgtacctgttgcctagtttgagttcttaaagcgccttcatactaacagtaataggaacttcctgtgttccagtctctccatgtggtacttytgacacattagctctatttttctgtctcataccagggaaatatttttattyatattttacactcagggacactgaggctcaggtacgttaaataactttgcamatggtgcatatctyctcaatgagagatgtagacttggaagatttctgtgactgcacagccatcagtttttctactatctcacttctattaactctttggggtcacagttactataaaaaccagtaatgatgatgacagctctactatttcgggaattgtatgccagttcttgtgccaagttccctgtgtgttatttcccacataatacacaatactttgtggcatgcttgtgtagggaaatctgggcatgagtggaaaagatacgctgaaggggactggaaggscctttttccccttggagactcttaataaactgtgttatgcaactgcattttgattatgacccatcacatgaggtcaggggtggaattttccacttgtggcgtcagctcagcactcaagaagtgtcagatttgggagcatttcagatattgggtatttggtgtaggrgtgcttaacctgtatttacatgaargaaacgtgaggtttgagcaagttggytgattggcccaggcccatgaagttgacaggtatcaaagtgatgacaaaactgataccctgcaccttgtgaatttctgcaaactacctgggtccctgggttgtagcccctccagtgcctacatcagctgctgcagttttaagcgcacaagtgcacctccaattcatcagtccttgtttgctttgccagtatgagtttctctaaagatggagctttggtttcaaagtaataatcacagtattcaatctattttctgtttatgttgagattaatgtttatcacttaaataaatgattgaatagggaaagaatgtttttcaaacctgtggcatgcatcatttcagctaagggagaaaaacatttaagttactgagttacttaactcccctaacctttgctttgtctccttttcagtacaatggacatctcaagatacctactttatagaaatgtagtgaagattaaagagatgaacaaagagtctctggcccagtgcctggcrcatagtaaaacacttcgacagttgctacagcaactagtagtaattctaataagagtttttcrttttcccccaagctatctgtttatatcaaagragtattttgtatatttctgacatgagctaagttctaaagtaagtaatggcagataactcaacctggttcattgtattaataacagtcagttgtatttgtgatttaagtagtactatttaaaaattggaattgtattgtgttggccaggtgyggtggctcacgcctgtaatcccagcactctgagaggctgaggtgggcagatcaggttaggtcaggagtttgagaacagcctgagcaacatggagaaacctcgtctctactaaaaatacaaaagtagctgggtgtggtggcaggcgcctgtaatcccagctactcgggaggctgaggcaggagaatctcttgaacccgggaggcagaggttgtggtgagccgagattgtgccactgcactccagcctgggtgataagagcgaaactccatctcaaaaaaaaaaaaaattgtattgtgttgaaaataatacatttgtgaaaatgagcctcctaagctttacttctactgttttgaaaatgtagttaatgatttcttgcctaattattaataaattcaaaaactgcaataaaaaatgaatattgtagaatttctagaacactccaaaactactcatcaatttagctctataaaattgaactgtaaacatgactggtgtttttattatatatgagtgtgacagaagccctttggggcttcatctattctctgttgctatattcagttgatttaagattctgaggcttattttttcattaattctgaatttttcaagttaatgtaatatgaacacatgttccttttcccatggatgaaaaaataagcttaatgaagaaaattatttaggctttgctataccagaagaaactctagcctttggtgctggtgcagtcagggttgaccctccctgccctctgtctgcttcatctccttcatcttccttgattgctgggtaagcagacacattccctgtcctgattgtgtcactgctggtattaggatgaaaaatgcatcagaatttatgaagatgtctttttttctagttctgagtatgaggttctttaaatgtttccaaaataatgtgtctttcccccayacatctccaggtacaattctctgtgaggttaggttttctttttttcttttttttttggaaatggagtctcgctctgtcacccaggccagagtgcaatggcgtgatctcagctcactgcaacctcctcctcccgggttcaagtaattctcctgcctcggcctcctgagtagctgggactatacaggtgcatgctgccacgcctggctaatttttattgtattttagtagagacggggtttcactgtgttgcccaggctggtctcgaactcctgagctgaggcaatctaccaacctttgcctcccaaagtgctaggattacaggcgtgagccactgcgcccagctgaggttaagttttcatgtgcaagtacctcaaatcagtatttccaaagaaaattttttgccaccaaagcaccacctttgyagttagccctattggttaatggccttttcattgtcatgtattttaagcctggcaatatttttctcccttctcccaggttgtctcttcacrttgtatttattctstcttgataatgtctctcacattcccctttctatttccacatccatatcctaaattcagattgtccctctctcttgaaatatgttgaataggttcttaattgagctccccacctccagctcccctcagccctttagttaatcttggaacagtgctcatgcaaattaagtgctttaattactctttgatttgaattgaattttatcgaagaarccagctatctgtggatatggagttttcagcgttggttcatatcttaacagcaacaccttgagagcagagtagtaccactttcaagtgcatatacctatttgtcaaaatttctttgcatcatttactgtaactcacttcggtttgtaatcaacataatagcttttcctttttcaaacttttttttaaagcaaaggatcaactctgggacatgcatttcattggttttaaaagttctcagtctctggaaaatgaatataataagaaacatttctrtaatatagcactaaaggagataaatgtcaggttgtcagaaaacttaaatgaataatggtatttgaggcatttgtttttcttgcaaattgagataygataattactgctatttaaattctccacccccacccccaacttggttttgcttrgatgtctttgggattgggggctttgggacacacaagtcatttttctctcctgtcagaagttctttaaggattaaaaacaatttttattttctctatgagaaaccaaagcatgtaaagttgaaaggcagcaaagacsagcgctgcttttaaaacagcattgtacatggctcatgcctgtaatcccagccctttgggaggccgagacgggcggatcatgaggtcaggagatcgagaccatcctggctaacatgatgaaaccctgtctctactacaaayacaaaaaaattagcccggcgaggtggcaggtgcctgtagtcccagctactcggtaggctgaggcaggagaatggcgtgaacctgggaagtggagcttgcagtgagccgagatcacgccactgcactccagcctgggcaacaaagcaagacttcgtctcaaaaaaaaaaaaaaaaatacagcattgtacaatactttgcaaaatgaaggtgggcatgtagtttgaagacatgcaaacctttataaaataaaaaagtgggcatacagttcgaagtaataaatgggcctaaggacctaaggatgaaccagttgtttttgcctcattgaaatgcttttttcttaaatatatatctttcctcttgctgttgtttttgctcttttttttttttaacaaaaawgtagactgagagctactagtgcagttacgttacgtggatatattgtgtagtggtgatgtctgggctttaagtgtacccatcacttgaatagtgaacattgtacccaataggtagtatttcatccctcaccccaaaattgatttaaaagatgaaaactcactatgtaattgtggcatgcaattaggttaataagttattaaaaatatgatcattcatgtcagcctaatctctttatttgaaatatgactctgttcatcttacagttcaacatgggaagattccatggccatgcttagcgtgaaggctttttactcatttcaagaatgtgagaggggtggggtggcagggggaagacagagcaagatggccaaattgaagcctgcagtggttgttccccggcagaaacaccaaattgaacaactgtacatacaaaaaagtaccttcataagaacaaaagaccaggtgggtgattgcagtatctggttttaacagtatattaaggaaagaggcactgaagagggtagaaaagacagtcttgaatggttgatgtcaccattccgccattctcctgcacagtccatgagacgtggagaaagaatctttgtgcttgggggaaggagagtgcagtgattgtgggactttgtattgtaactcagtgttgccctgtcacagtagaaagcaacaccaggaagaactcagcaggttcccaaggagggagcatttagaccagccctagccagaggcaaattgtccatgccaatggtcagaacctgagttccggcaagctccaccaccacaggctaaagtgctctgaagttctaaataaacttgaaaggcagtctaggccacaaggactgcaaggaaagtcctggtcctgtactgagctcagaaccagtggacctggggtacacatgacctaagaagataycagctggtgaagggagtgcttgagctgctccccactaactctaggcaacacagctcacagctccaggcarctccttcttccctttgtttcagaagaggagaggagagagtaaagaggatattgttttgcaacttggatactagttcagccatagtagcatagggcaccaggcagagtcctgaggcctctgttctaggccttggcttccrgacagcgtttctaaacataccctgagctggaagagaacctgctgccttgaatgaagggagggactcagttcttgcagagtgcatcacctgctaascgaagagcactgggccctgaataatcagcagtgatagccaagcagtacttgctgcaggccttgagtgagactcagagccctgctggcttcagttgtgaacagcacattcccagctgtggtggctacagggagagatcccttctgcttgaggaaaagagagggaaaagtaaagaggactttatcttgccgcttgggtaccagtttggccacagtatggcagaggatcaagtgggctcctaggatctctgatttcaggatttggctcctgaatgacattcctggacctgtcctgggccagaggaaagacaacttccctgaggagagagactcaggactggcagcattcaccacaagctcactgaagagcccttggacctcgagtgaatgtcattggtagccaggcaatactctccatgtgcccggagcagtggtggtcagagagattcctctgcttgaggaaaggagagggaagggcagaaaggactttgtcttatggtttgggtgccagcttagstgcggtagaatagagcaccaagtagatttctaaatttcccaactccaggccgtgactcccagaaaacatctctggacctgaccagagccagagagaacttactgccctgaagggaaggacacaagcctggcaggatttcccatatacttattgcagaacccttgggacttgagttaacataggtggtagccaggcagtaattgttgtaggccttgggtgagacccagtgttaggctggcttcatttctgacccaatatagtcccagtggcggtggccacaggagtgcttgtgtcacccctcccacagcttcaggcagctctggagagagagagagagagagagaaagaaagagagaggagaggggagagagacagagagacagagacagatttcatctgtttggagggaagtaagggatgagaacaagagtctctgcctggtaatccagggaattcttctggaagttacccawgaccaccacggtggtatctgtacaagyctgcartagccacagtgttattgggcttggggcacccctaaagtagaaacgggtaaagtgaccaaaaacttagatgactacacccatgtcccttcaaatacctggaaagccttcccaagkataggcagaaacaagcccagactgaaaagactacagtgaatacctaactcttcaaaacccagacactgacaaacacccaaagcatcaagaccttccagraaaacatgacctcaccaaactaagtcacctgtagccaatcctggagagagagagagatatgtgagctttcagaaagggaattcaaaatagctgttttgaagaagctcagtggaatccaagataacacagagaaggagttcagagttgtattagacaaatctaatgaagagagggagatataaagaatcaagcagagattctggagctgaaaaatgcagctggcctactgaagaatgcatcagagtctgttaatagcagaaataagcaaaacaaagaattagtgagcttgaagacaagctgtttgaaaatacacagtcagaggagacaaaagagaaaagaatacaaaacaatgaagcatgcctgcagaatctacaaaatagcctcaaaagggcaatctaagagttattggccttaaagaggaggcagagagagagagagaaaagttaattcaaagggataacagaraacttccaaaacctagagaaagatatcaatatttaagtacaggaaggtaatagaacactaagcagatttaacccaaataagactatctcatggcatttaatgaactcccaaaggtcaaagataaagaaaggatcctaaaagcagcaagagaaaagaaataacaaagatctccaaaatgtatggcagcagatgtttcagtggaaatcttacaagccaggagagagtgatattacatatttaaagtactcaaggaaaaaaaatcttctaayctacaatagtatatccagtgaaaatatccttcaaacatgtatatttaggagaaataaagactttcccagacaaacaaaacaccagaactatcctgcaagaaatgctaaaggattctttcttcaatctgaaagaaaaggatgttaatgagtaataaaaaactatctgaaagtasaaaacttactggtwatagtaagtacacasaaaaataaasaatatcataacactattgtagtatgtaaactactcatatcttgagtggaaagactaaacaatgaatctatcaaaaataataaccacaacttttcaagacatagatagtatgatataaacagaaacaacaaaaagttaaaaagcaggggtatgaaaagtatagtgtttttattagtttaattgtttatgcaatcagtgttgtcatctgtttaatataatgggttacaagatgttatttgcaagcctcacagtacactcaaagcaaaaacttaaaacagatctagaaaaaataaaaaagcaagcaataaaaacatatcacttgagaaaatcaccttcattaaaaggaagacaggaaggaatgaaagaagaaagagaagactacaaaacaaccagaaaacaaataacaaaatagcaggagtaaatcctattcatcaataataacattgaatgtaaatggactaaactctaatcgaaagatgtagagtggctgaatggataaataaaactagctgcaatgatctgttgcctgcaagaacacacttcgcctataatataaagacacacatagactaaaaataaagagatatggaagaagatgttgcatgaaaatagaaaccaaaaagagcaggaggagctatgcttatatcagacaaaatagccttcaagacaaaaactatggtaagagacaaagaaggtcattatatgacaaaggggtcaattcagcaagagatataacaattgtaaatatatatgcacccaacactggagcactcatatatgttatgtaaagttattattagataagaccccaatacaataatagctggagacttcacccactgtcagcattggaaatatcatccagacagaaagtcagcaaacatcttacttaatctgcagtacagaccaaatggacctaatagacatttacagaayattttatccaatggctgcagagtacacattcttcagctcatggatcattctcgaggaaagaccatatttcaggccacaaaacaaatcttaaaacatttttttaaaaattatgtcaaatatcttctctgaccaccayggaataaaattagaaatcaataacagctgaaattttggaaattatacaaacacatggaaattaaacaayatgcttctgaatgaccagtgggtcmatgaaaaaattaagaaaattttaaaaatatattgaaacaaatgaaaatggaaacgcaatgtatcaaaacctatgagatrtggtgaaagcagtattcagaggaaagtttatagtagtaattgcctacatcaaaaagtagaaaaactaatgatacattttaaacaactagaaaagcaagtgaaaaccagacccaaaattagtagaaggaaaaataaagatcagagcagaaataaatgaaattgaaatgaaaaaatacaaaaggtaaatgaaacaaaaagttgtttttttgaaaaaagaaatcaaattgacaaatcttcagaaaaaaagagaagacccaaataaaattagagatgaaaaaggagacattacaattgatatcatagaaattcaaagatcattagaagatactgtgagctactatataccaataaattggaaaacctagaagaaatggatatgtttctagacacacacaacctaccaagattgaaccactaagaaatgcaaaacctgaacagacgaagtaatgagatcaatgccataatgaagtcgctcagcaaagaaaagcgctagayttgatggcttaactgctgaattttagcaaatgcgtaaagaaccactaataccaatgctactcaaactgtttcataaaactgatgaggaaggaatacttgcagattcattctaggaggctagtatcaccctgatasaaaaaccagacaaaggcacattaaaaaaaaaaamaaaaaactgcaggcaagtaaccctgatgaatatagatgcaaaaatcctcaacaaaatactaacaaactgaattcagcaacacattaaaaaaagcatttatcatgaccaagcgggatttattccagttacgcaaggatggttcaacatatgcaaatcaatcaatgatacatcatatgaacacaaggacaaaaacgatatgattatttcaatttttgctgaaaaagcatttcataaaattcaacatcctttcatgattaaaaacccacagaaactgtgtatasaaggaayataccttgacacaataaaagccatatatgacagacccacagctaatatagtgaaggggaaacacctgaaggttttctccctacaatctgaaatgagacaaacatgctcactttcaccactgttattcaacatagtactggaagtcatagctagagaaatcagacaagagaaagatataaagggtatccaagttggatgtcaaattatccttgtttgcagatgatacgatcttatatttggaaaaatctaaagactctaccaaaaaactattagaactgataaacaaattgagtacagttgcaagatataaaaatcaacatacaaaaatcagtagcatttttatatgccaacagtggacaatctgaaaaataattcaagaaagtaattccatttacaataactacaaatcaastacctaggaataaacttaaccagagaagtgaaagatgtccacagtgaaatctataaaacattgatgtaaaaaattgaagaggacmcmagataaatggaaagatattccatgttcatggtttggaagaatcaatactgttaaaatgcccattctatccaaagcaatctgcmgattcaatgcaatccatataaaaataccaatgacattcttcatgaaaatagaaaaaaataatcttagcatttacataataccacaaaagacccagaatagctaaagctatcctgagcaaaaagtactggaggaatcacattatctgacttcaaattatactacagagatatagtaaccaaaacagcatggtactggcataaaaacagacacatagaccaatggaacactatagaggacccagaaataaatccatacatctacagcaaactcattttcaacaaagttgccaagaatatgcattgaggaaaacacaatctcttcagtaagtggtgctgggaaaactgaatatctatatgcagaagaataaaactagacccctatctcttgccatatacaaaaatcaaatcaaaatggattaaagacttaaatataagacctcaaactatgaaacttctacaagaagacactgggggaactctccaggacattggtcttggcaaagatttcttgagtaataccctacaaacacagttaaccaaagcaaaaatggacaaatgggatagcttaagttaaaaagcttctgcatagcaaagtaaacaaatttgaagagcaaatttgaaagcaatttgaagagacaactcacagaatgggagaaaatatttgcaaactattcatctgacaaggggttaataaccaaaatatataaggagctcaaacaattccataggaaaaaaaatctaataatctgattaaaaaatgagcagagatctggatagacatttctcaaaagaaacatacaaatggcaaatatatgaaaaggttctcaacataactgatcatcagagaaatgcaaatcaaaactacagtaatatcccagttaaaatggcttattgaagaggacacaaaataatgaaaagatatgcaaaagacaggcaataacaagtgctggagaggacgttgagaaaagtgaactctcatacattgttggtgggaatgtaaattagtacaaccactgtggaggacagtttggaggttactcaaaagactaaagagctaccatatgatccagcaaactcgctgctaggtatatacccaaaagaaaggaaatcagtgtattgaagagctatctgtacccccgtgtttattgcagcattgttcacactagccaagatttggaagcaacctaagtgtccctaacagaggaatggataaagaaaatatgatacatatacacaatggagtactattcagctataaaaaagaatgatatcttgtcatttgcaacaacstggatggaactggaggtcattgtgttaagtgaaataagccaggcacagaaagacaaacatcacatgttctcacttctttgtgagaactaaaaatttaaaacaactgagctcacggaaagagagagtagaaggattgttaccagaagctgggaagggtagttggggagggggagatggttaatgcatacacagatgttgttacatatgatgtataagatctagtatttgatagcataacagggtgactacagtcaacagtaatttgttgtacattttaaaatagcttaaaaatatgataggattgtttgtaacacaaaggataaatgcttgagatgatgtatatcccatttaccctacgtgattattatgtattgtattcctgcatcaaaatatcccttgtaccccataaatgtacstacaacatatsttatatgtacccacaacaattttttaaaaaaatgaatgcaggggaacctagaaatacctagttcttttccttgagtcaagccttttgagcaagagacaagatcttttagtgaactcagttctgccatagtgttgctatggtggttttacttgtttacttctgttttttcacaggatttcaaggcatattaggatgttatgatgatgattccaaactgtgcaaataaagggcaaattacatgttcttccacaaaaggagcttctgttatccctctttgccacacacttgctagaatggccaaagtagttgttattttcttaaagttaaactgattcgtggataataattaacagctgctatcattaacctttattgtgtcaggccctgtgccaattatttaatcttaccacaacagggtaaggtacatattgtgattgtctccattttacataagttaacactgatgcccagagaagttaagtaaattgcccaaagccagagtttcaactggtctaagtttttttgattggaaaccatgtctattttytgggcaacttctctgggcatgctataacctcccacatggacagcttggcaagttcatgccttattacagtttgaaatgttacacgtccccttcctttccccagtaaatgatgggtttcctagacgttttatttctctgttctgagaaggagaaatggaaggaggagaaaggatggcgggrgagaggagtaatgtgtatatttagtcactatcaatgacattttagggccaatagggccaactgaaacagagttctgcccacagttagtgtktcattggttagccttatgtgattaaatccttctaaatgcaattaaatccttatcaaccaaaagaagaaaaattatgttctctttagggaaataagtayagatatatcattttccttagatttgtgaaytatttyttcagaaaaccaaasctgattcccaagagacaagaaaaacaggatttttttttccttytcaacatttacatgaaataacacctaagtactttaaagtgtgaacacatgtcccatggtactcaatgatgtgatatatctgttgccttctgccacctacaaatgaagaaaagattttgaagagagtaacatcatttttaaactttcttatttgtgaagttcccttgccatgctaaagcctgaggagccaatgcattgcctccaggtggtgaatgttgggtagaaattagctggagcagctgctccctcagtgtggcacagcacagaggtggtcagtgcacatcaggctgtgacartatgaccaggaatacatggagtgatacagagcagggttggttttgtgtcggcctgcctattgggaggactgtgccatgaytgtgtagatacagccagaaaagtcttttggactcacaagtattagcccagtgatctccctgcagcatgccctcagtggctccccagctgtcttagcccggtccagcatggttggcaccttcctgtctttccttgtccgcctggggccataacctcctgtttgccaccctcctatgttctctgtcctgatgggctgaattctagtcctcctgctctccaagccctttatcctggcggatctcttgcttttgctcctacctcgatgctcttcyctcctctcttcactaccctgctttccgctctcagctcctgcattaattcctcagtggtrttctccctgccttggtcagatcctctaattatacattcttttcacaccccatgcctttctgtcgaggacttgccctaggtgcatttgacatttgggttcttacagtgtttgggagaggaggtagggttgagtggttgagccatgggcactcaagccataccgttggcttcaaaccaaacttggccacttagcaaccttgccaactctgtgcctcagtggctcctctgtaaaaggggagtgatcactgtacctcattcttaaaggtgtggtrgagagtaaatgagttgatattagaacggcagctgatgtctagaatgggcttactgcatggtagctctctttaatatttgatgtaatgatcatccttccattagattgtgaactccaggcagacaagggctataactgtttttgttgcataacatccccccggtcctgctgaaatgcctcactcactgtggggcacccatymagtgttagtttttactgtgtaccagcactgagtcaggcgaactgaagacttcaacctcggtttcaaccggtagtctgtcataggatttacagattcatgtaacgctcttgacagggatggttatagtttttacctggcttaaaggggggcgggggttccctttttttaaaatcaatttcaatcttatttggaagctcagtgtatcaaacacattcaaaataraggtgctttgcttargaaagarcatggcttgtttgggatcccccatccttatcctgcctctgactgcctctggaaacctttgccctaaataatgatggtctgctttctaaggctattgggtgagasaccaacttggaatgcttaataagcaagcatggaagtaacttgcagaagaaaaaagacttcagccttttaatrtcaaaaatatcaaatagggaataatttcmagtggtgatgtcagggacagctgcgttgtctgtacagcgttggagagaagatcctgcttcggcatagcctatgattttgaaggctactctatagctgccacctttcatcttaaagaaaaaggattttaattatgacaatgagaacaagatgacatattgttttattasttgcttaattttatttagctgactcacttastatgggaatgtctctaggggctgctggagagtctctttctataaaaggagagagatccyaagaggcasatttgtttaagagtgttgcataatgtgctctacgtcttgggtttctaccattctcaggttatgaactgtasarctggatttttttggtaatttttctaatcaaaaggaaaatcaataaggctcactactgaataacatatttaataacttgataaaataatcagagtttttggcacttmcagaattagattaaataaagattttatttttcagtgtgaagaaaaaatttttattagttaccatagtgaaatgggaagagtatttttttgccgttaacgttaagggagttttcttaaagaaagtgttctgtgccagggttgttacatatggtattctcttttgttattttttaaacttaaccttaaaatatatttcctttaaatagattcctaagtttgggactgatgactaaggttcccttaaatttgtacgtacttaagttgattcactacttccaacatgaattatattctgaacaaggaaagaaaaaatatttagctgttatgggccatctggctttaaaatgtagagaattgtcttccagcctgcatctattttagagtgactattggatcagaattccaatgaatctgaaacagtagattcacaaattaaactttaatgctttgaggattgtaaatcacagcacatgtggggtgatacatgttttgggagagatggatcctcctgacccacatgtaaaaaattaaagctgtctgtattctgtgtttattgaatgtatttattttaccaaggtggatctgaataaacagtttctaggtttataatmttattgggattttttaaaactaaaaaattcgtttagttgaattatgcaatataaatccttagcaatatccccaaaaagtttttccaaagaagtaatattggttcttgatgtttcctcatggttcttttttttttaaccaatataaaagcaaattttaaaaaaaggtgttatttcccttggaaggaagctgtgattcccatggttggttattagtccaaagccgtrgaacttctttccttataaacctctcattctggcaagacaggacacttggacaatgattttcctaataagtataaccaaaagactttccctaattttaatgtttcccaaaataagtcctcatcagatttgccccccgaaaggtaagtgaggaaagttcaagacaagtttgatagacatatttgttgaagacatttcttaatttcagattttttgatatgtgaatatgccagttacraacttctgaaaagaggrttgtggagaggaggactataagaagtagtgttttctgaactattttgacctttggctattttacaggacttttgggttgctgattgcaacatgagagaaggacatcttgtctggtgggcatatacatgtacmtagcctttttaagagaagcttttgggtttgatatggcagtagattsccctgcycacctccccaaccccaatatatttgaacatttctgaaattgggatgcrgtttacaatcattccatgtgttttcttgttttttaacttgcaggaatgctgttaatgaactgagagtgccttaaaattaattaagtaattcagcttttaattttaatttgttcatgctcagcctactgactttgcaagaagtacagtattaagtgaaaagcattgaaggagasgaaaaaggctattttgtggaaaatgtctttataatcagctttattgtttagaagrtctagaatctggttaaaaagcaaaatgagccatgctttttggcagcttattgtggtttcawaccactgctaagcgcgttgtacctatgtatytgtggtagctattactgccccattttgaaagtgagggcattgaaactcaaagaggtgctgtaatttatctaccttaatagctgatggagaatgagattttagtctcaggcagtctcatttttcccaacccactctttgttttagttaattgatctttgacatttatttacttggtgtatactatctttatacctttgcattatggcatataccagtgatttctggaactasgtcattattasaatcaccttggaaactttggtaaactataaatttctggctcaacccttaaaatatactaattcactasctctgggatgtascttgtattttaaacattaatgtaaaagctccaagtgattttgatgaagctagaattgagtatgacatctaaacacattataaaaaatgcttttctttccaccaacgataaaaatgggctgggcactgtggctcatgcttgtaatcccagcactttgggagaacaaggtaggaggatcgcttgagcccaggagctcgaaaccagccctagcagcatagtgagactttgtttctaaaaaaaaaaaaataagacaaattagccaggtgtggtggtgtasatttgtagtcccagcttgcttgggaggctaaggtgggaggatcccttgagcctaggagttcaaggctgcagtgagccgtgatttgtgccactgcactccagcctgggcgacagagtgagaccatgtctttaaaaatatatatagtagaatgcacatagcccccatatcatgaagaacgtaattgaatgatgtatgactcctgtatcagcttttgacatctagagttggcggtcaaggtgtgttgagaaagcagatgggcataaaaacctaaagctactgggtacctttgcctgaaatatataacggtgatttcttttattattattattattattacactttaagttttagggtacatgtgcacaacatgcaggttagttacatatgtatacatgtgccatgttggtgtgctgcacccattaactcatcatttaacattaggtatatctcctaatgctatccctcccccctccccccaccccacaacaagcccctgtgtgtggtgtgtgatgttccctttcctgtgtcaatgtgttctcatagttcaattcccacctatgagtgagaacatgcggtgtttggttttttgtccttgccatagtttgctgagaatgatgtttccaccttcatccatgtccctacaaaggacatgaactcatcatttttatggctgcrtagtattccatggtgtatatgtgccacattttcttaatccagtctatcattgatggacatttgggttggttccaagtctttgctagtgtgagtagtgccrcaataaacatacgtgtgcatgtgtctttatagcagcatgatttataatcctttgggtatatacccagtaatgggatggctgggtcaaatggtatttctagttctggatccctgaggaaccgccacactgacttccacaatggttgaagtagtttacattcctaccaacagtgtaaaagtgttcctatttctccacatcctctccagcacctgttgtttcctgactttttaatgatcaccattctaactggtgtgagatggtatctcattgtggttttgatttgcatttctctgatggccagtgatgatgagcgttttttcacgtgtcttttggctgcataaatgtcttcttttgagaagtgtctgttcatatccttcgcccagtttttgatgggattctttgttttttttcttgtaaatttgtttgagttcattgtagattctggatattagccctttgtcagatgagtagattgcaaaaattttctcccattctgtaggttgcctgttcactctgatggtagattcttttgctgtgcagaagctctttagtttaattggatcccatttgtcaattttggcttttgttgccattgcttttggtgctttagacatgaagtccttgcccatgcctatgtcctgaatggtattgcctaggttttcttctagggtttttatggttttaggtctaacatttaagtctttaatccatcttgaattcatttttgtataaggtgtaaggaagggatccagtttcagctttctacacatggctagccggttttcccagcaccatttattaaatagggaatcctttccccatttcttgtttttgtcaggtttgtcaaagatcaggtggttgtagatatgtgacattatttctgagggctctgttctgttccattggtctatatctctgttttggtaccagtaccatgctgttttggttactgtagccttgtagtattgtttgaagtcaggtagtgtgatgcctccagctttgttcttttggcttaggattgacttggcaatacgggctctgttttggttccatatgaactttaaagtagttttttccaattctgtgaagaaagtccttagtatcttgatggggatggcattgaatctataaattaccttgggcagtatggccattttcatgatattgattcttcctacccatgagcatggaatgttcttccatttgtttgtatcctcttttatttcattgagcagtggtttgtagttctccttgaagaggtccttcacctctcttgtaaattggattcctaggtattttattctctttgaatgtaagggtgctttcatgcctcctgatccatatagtcttgatgtattaaaagtcttcattaagaataacttcagtgtaaactgtcatggatggatttgggtaagatgtcaacacacacatgatcttccactcttcagtgctgatatcagtmaaaaagaagcctctctaatctgcctccaaatagctgcagcttctttgatctagtctaatcagaggaacaagcccattaggggttaaaagattctstgctgctgctgctgccattaacttaattgctatgatacagtaaactatggggaagtcgagttaaatgctgaagtctttagggcaagagactaaataggttagttccataattaatgttgtatttaagaaggtacatagtgttccccaaagtgtgaccttgcagaagtgacaattatgtctgaagtcagcatgaaagtgaagtaacaattcaattctggtttggggaagtgtgtgggagtgaatgtggcagagtaggtgtgaaataaatgttctttagcatcagtgaagatttgtcggtaaccatcatttcagatatctgggagttgtgcaacccttctgttctttctgagtcatatatgttttttaaaaagttatactttaaaaatatttgtgaatatttaaaggcaacactgtatcttgtgtgtacaaacccatctgtgggctgacattattcaggggcatstgatcagatgtggattaattgcatgtggtggagctttttatgccaactctttcagatattctagctcactggcagtgtcttcatgaacgtggattggccatcttttggattaatgggctagttaaagaaatcgaatcattatgagtccaaccacttgctagactcagtttatctcattgctaaaggtattagagctgcatttggtgaacatatttttctaataataggctttgacttcttaaaattatgtatttttttcctcttgatgaatttctctgaaagcagcctagtcctaaaactcacttctccccactgaccaatgtttattcaaataattttcctccatttgggcatgcagctactaccacaaakcaagcagggaagtcattctcaggatccttaattgcagaagctactcatttgttttagttattttcccatgtaggttgcataaccttgaggaaagggcatctagtatattatattgttcccataatagttaaatgactctttttagsaatcctgataatatccataataattattattcatactaragcaaataaacaagcaacccactatgtgcctatctctgtgctcaacaaaacattatcacattttgatcctcacactaaactggttttgttctgtaattggttcakttggttggttttgaagacgtgcatgtaggcaagttgctttcatcttgttttatgatgaaggctcatcagtcaccttgtaaatggccgtaagattgctgagctgaagctcaatgatggrgggaaaagacctcaaagtctaataatggatgagggcccttgttatctaagacattgactagaaattgagttcagtctttggtcaagaagagtcttgtctgatcataatgaaaacccaacccgattggggttgatatctgaattctactttaacatctgactgtagtggctggataatttgccttcctttcccttctttcatccattcactcccctcaccctacctcacccaccccatcttaatttgtattttgaatttgagtattgttttttaaaaataaggaaatttaaaatatatatattctcaaggtactcataytataatatagtcactaaagacattgagttcaaagttgggttcatatcagagctctgctgtttgatagtaaacttgggtttattatggtawtattaaacttgggtaatacccaagtttgttatggtaaaacttgcgtaagtgacttaaaaatctctgtgcctcagtttccttatctttacaaccctggataagtagtgtctcctgggaaggattgtgggaaatgaggttatgtgtgtaacaacttttgcacagtgactagtgcccagaaagggctccagatgtgcacaagaaatggtggcccttttattaagaagatatatttaggactttaaaagttaggttaaggctgagcgtggtggctcacacctataatcccagcactttgagaggctaaggcaagtggatcacgaggtcaggagattgagaccatcctggctaacacggtgaaaccccatctctactaaaaataccaaaaattagccgggtgtggtggcaggtgcctgtagtcccagctactcgagaggctgaggcaggagaattgcttgaacccaggaggtggaggttgcagtgagccgagatcatgcgagtgcactccagcctgggtgacagagtgaggctctgtctcaagaaaaaaaaaaaaaaagtttggttaaaaaataatgacttttggtgctgtgggatttgtgagctcaaggacttgtgctgcaagaacaacaaatagcagcctgcttatttaatagaaagtgccctcagtgagggtctgatctgcttttggcttgaggaatgcttcagaattttaattatttggaggagcttccttgaagttgctttatggttgctttctcttcacatcaaactgaagacataactgtaacaaatgagtattcctacaccaagatgtgacacagcaaatgaatttatggatgatgacattaatgatcatcatcagcatggctagggttctggtttgattagtagctcagactgctttcttaagatgaaatagtcatttaaatgaacatggcatcttctcttgaacaatgcttaggttatttttttttctcatagagattgaagacccattactcagcattatctccctctctcccctgaaacttttgtctgttcggaatgagctactccaggaagatttattgcttttcctcagtgttcttattagcatgctttatatarcttattgtgacacttatgataatacaaaaagtaataaaaatacaattattatcattcggtagctgctgatattcactgggcatatactatgtgccagatttgcatcgtcatctcatttgawcctcacaacttgtgagggagagatcttcatggcccccattttccaggtggtgaagagattaacttagagctgaaatacttacatagagtcagggctaggatttaaaacaggactsatggtgaaacctgaaggcatagacatgacccatagctgcctttatgttttacaacttcctgttgattttcattttcctcgtttgtcagtcatctcccttgacttcccacatctatctatgttgcatcctagcctggtgcctggcctggcggaggcattggarcattggaaagaatgaatgaatgagtttagccctctggagagtgtatgctgaaaaactgttacctcgcctttaagagcttaaaagtgaagagaatgaattttgatagaaccattttttaaagtaaggaccatccttctgtgtccccagaaaattaaatagagtcagaaaatggcaaagccaagttagaagcattcaggtgtggaagttgtatagggcacttgakttaaaaaaaaaaaaaatctgctcaggcataaaataattaaactgttcatgacagcgtataattgcatcattatattcccaactctgttactrtaatttggctcataaaagagcaaagtgtcaaaatctttctaatggtatttaattttgttttagcatttcctaaaggaagtgttcattttgtactttgaacttgtaaacttttgacacatccttacattctttgctgttgcaaatcattcgtgtacactacagaaatgactmattktccatttttcataatttggagtcaggtctttatatgaactttagatatttcattgttgaagacacttacatttgcatactttcaatgtaccttgttttttartctatcttatttggagttaatattgttagtaatataacctggaaaaataataactcaattgattcaagaccattttaattaaaaatatgtgctaactcttcagggaccagctagaggtttacacttctctgaagacaggggttattgagcaaattaataatgtaaacaagatttttggagagaatatttaatcagcttgagagaaggcacttttcaagcaagctgcagcactttagaattatccattgacattcaaagattgatgtgttaattactaatcattgttttgaattcattaaactggtcatttaaatatctttatttggtcacattctattggtctcatgtaaattccaatgtcttttgactataacggtgatgcatgttgaatcctttcttaataattactatgttaccacttactttccaataatttagtcatcttgggtacacagtaaagcctctctggtcctaacctttcacatctgtcaaatggggccactttaaaccacttcatagggttttcctgatactgaaatgagataaagcayatgaatcgcttggtgcagtgctcaggaagtasgttactaattattagtccaaattagtgtgattttattattgagtgtggctgctattgctgcatttttttaccttagagttgcactgtaaattgatttatgcagggcctgaaatgaagatatgtggttacagtatttctcctcccaagatttgggcatttatttatatgagaaatctcacagaagtatagaaataaagtgtggtatgtttatttgctcagagggaaagcaataaacttgtagaaaattacaagtcttgagacatcaattggagttaggcccactgaattgtggctcggatttgagattaagggagtctcaaatttggaagtgggtggcctcagggtcccaygtgggcctaaggattgtatctttaagtcatcttcatagttaggactttgttcctttgctaaagctgtgattttctttttttcccatattgctagaaaccttctggtccttatgcaatctcccagtgctacctatggggtcatgctcagtttggaatgcttctcatagttggagagtcaggtttacttgcttaatgttttttctaaaaaagttgaactagttttagttgtactaagttatcttygtgcaaaatgagattttccgtagatacttatattctttmttgggattgtggcactagtataatcaactgatatttaatatcctttatgaaattttgtttacctgagattttgcattcatacaacttctggaaaatagcaccaaaagtgtatgtactatatggttycatttttttctagtatcagttttctggaattcttgtaacagttaaatatgtcaaagacaagatgtaccagtccattaaggagatgagtttattcrggttattgaagtggggggatgttcagaaatgaagaaggtctgaaagaagagggagaaaaggtgaagatttataacacagggaaccaggaaggctggagktgggccttatgatatgcaacggcaagttggttttcgtggcttaggacgtttcccaaaawgcaaaagggtaaagatttctgaaccttggttattgacttcaggagcactgggcccctgataamcatttgataaaatggttaaaaaaaataaagtaaaaatattttttcaagtagtaagaaaaacatattgggcttttcattagttgttgttttaccgatgtttaattcaaactatgttaatgttgcgattgccttcttcgttggcccaagaactcctaaaaacaagttttcattatacaaattgaaaatacctattctaactctaaactattgaaagcaattaattaagaagttttatctgcttatatctctcacttaaatagcccatatgagaaaaatagtctactatttattctctatatggacctggctgttaaataattcgaagtcactagtacctaattcttaaattggtatataccttcactggctcgttacaagcaggttccttcttgaaaacatggtttttgttggtgtttttggtttatggctccttgcacacaacttttctatatcaaatgattttccattaataagtgargcattgtctgctgttatttcatccccaaattccccacttaacccagtgctggcattactggaactctctggaacccacttctgtagctgacctgcagctcctcattttttaaaatctctcttcctgctctgcattatctttctctcattatgaaaatccagcatccsctctcaaactcacttcctctggagtggcttaatggactttttctgtttattcttttctgctttgtcacttgcatagttctatacagttctatacaggacctggataatatgcacagctcagctcttagagatatatatacatatttatatcttggggatatatacacatatatatatatttatgtaccataaaacatttcagtcaacagtgaaccacatatatgacagtggccccataagattataatggagttgaaaaattcctattgcccagtgttgacgtagacattgtaatgtcatagtgcaattattaatactttattttttaataaatttagtgtaaccttaagggtacagtgcttattaaagtctacagtagtttacaataatatcctagatcttcacattcactcaccactccctcactggctcacccagaacaatttctagtccygtaagcttcattcatgttaagtgstctatataggtctaccattttcattttctaccttttatgcctttttttttttttttttttttttgacagagtctagctctgtcgccaggctggagtgcagtgcccckatctcggtttattgcaacctctgcctcccagtttcaagtgattctcctgcctcagcctcctgagtagctgggactacaggcgtgtgccaccagacctagctaattttygtatttttagtagagatggggtttcaccatattggccaggatggtcttgatctcttgaccttgtgatgcacccacctcggcctcccaaagtgctgggattacaggcctgagtcaccacgccagctaccttttgtgccatatttttatagtatcttttttatgttttgatacacaaatacttgccagtgtgttacaattacctacagtattcagtacaataacatgctatacatgtttgtatctaggaggagcaataggctataccatatagcctgggtatgtagtaggctgcaccatctaggtttgtgtaagtacagtttgtgatgttggcacaataaaatagcctaacaatgcatttcccagaacatagctccattattaagtgccacattactgcatatgtgtgtgtgtgtgtgtgtgwatgcgcatatgatgtcatatttgaataacttctaagtgctttcacttacgctacctttataagaacatcatcatcatcttcagtttattgagaaggaagctgaggcttacagtgtgactttctcacagttgcatagcttttcggcacmaaaggctagaacaagatgttgcatacagaccggggcactggttctctttcctgtctgcttacttagtagttgttcactgaaatgcagatttgcagcttgaagtacctaggcaatcaaagcgagtttttccytctcaaagatacttggtctaaacagtaataggtagttaacagccgcattctgggaagtaaccttcagaggccagatctggaatttttccaaccctttctgtatcaagtgagtgatctttattcaagcttagaaacttgtggaaaagagcagaccagatgcttcattttccaaacctaccgaattacttggaggaaaagcactggttggaatgaaggcttcttagcccyataggaatttatattgcctgtgtgtgatatccctataaaatgagcttcctggcaagacttagtaaacacatttcaactagctataaagatttcataaaccatgttcttagtgagatgtagtagggaagaatcatggctcccaggatgtcattaattttatattaagctcagaatttaagaatagctaggaaaggcacgtgtccataatccgtagttacattcttaaagtgcagggaaaatgatcaatgctgtccaggaggccagtaaagcaatgcggttaagagctttcaatgttgcatccagagagctagttcaggttgtctctctctgcttactaccttgactaaattacttacccactctctgcttcattttccttatccgtaagaatgaggattatgacrgtatttaaytcagagttactgtgaagatgagcagattttatgtaatatccttggcacagtgcctaccacatacagaaaatgctcttctttttattttttggacatcagttgataccacttgatactgyacacatagctaaaattattttttgtttgcttttagacctaagtttttttgtgtgattttttttgactccatcttaacacttgataattatgaaaaccaattaattggttaggatgtgtgccaaacttgataccattctacatctccatcatttgaatgcctgggcatttgatcttagtaatcccaccctgggataaaagcatgttaaggaagagactaaagccctctcaagagatccactgctatagtccgttataatccgagagcaattgaggtcagtatccaccatggacagtcccttccaaggcttctgctacgttcttgagctacctacataatagagggcccctgaattcattgatgagatgatctaacagggtaatattctgaaatagcattcaaaatcatttcatggtgagaatttgttgtttctcttttactttcttctgcaggtgaattttcaggaatattggaagtcccagttggaggtaacacatggtaatcgaataatttggtcatttcccccatctttactacatacgtcttcatctaggacactatattctacagaaaggcttaagttggatagtgtccccatttaaatctccatctctttgcttcaagggtgaattattactggcarctgcaggagtggtattctgtcagcaacattctccatcttgctccctgataaacttactagtgggtgwyttgtgattttttttattattgtattagatgaaactattcctctgcctagtgtccatctaccatcaaatatttatctagagcatctcaagtactccaratgataacactgatttatggttatttgaartttctttgaggcctgctgacagattacaaaaattgcttgatatatctgtcttaaaagagawcattgaactaagaatgagttgtcatgttgtttggaatagaatatgtgtattatcatatttgaagctaattcttaacaaaataattcctatgtaacatatggattaagtttaaatttgaatttaacctcatattcagaataaaaacattatttcttggggaagtaattatattattactctattaaattaacctgaggacttctgcttttggctaaattagagtggcttgtgacaaactgatgtttctttgaaaacaatagaaaagccacatgtaaacctaatttgaagataacaaagaactgccaagacaaccaagagacccagaaatcagggaactatagagtgctgagccgggagtccacaggctgcttttcccttcagggaatttgctgggttttggctcaaggagcagttgarraaacaggcagctagaaaatcataccttgtgggcaacataatttttggtgatctcataaggctgaagagacaagcatagaagtttgggtctgccaaagcagccaggattcagwggaaccaagacctaagagagaagatgggtgccttgggtagatttatacctgaaggctttttattattattattattattattattattattattattattattttaatgagatagggtcttgctctgctgcccaggctggattgcagtagaatgatcatagctcactgcaacctcaaactcctgggctcaagcagtcctcccacctcagcctcctgaatagcttgtactataagtgtgcatgagcatacctggctaatattttaagtattttgtggagacagggtcttgctatgttgaccagactggtcttgaactcctggcttcaagccattttcctaccttggtgcaaagtgttgggatcacaggtgtgagccactgtgtgtgtttttgatagtctcctrgggctgaggttaaaataagtagagttgcacatccacgaatgacaggtgtactagtgtaccccacaggccttaaaccacacctatggagtgtgtgtaaaccagaggtggaccacatctttcaaaacactaaccagctttgagtcaactcaattccaaattggatgaaagtaacgccccatttcagactggctgccagagagtaggatgaaccttctttggtgggagataccatcatgcagagtctctataattctgcattcacagcttctgtaattctacttaaaatcctcagacacatcaagaaagaggaccaagagaaacaaacaaaaaatggaaagaatctcaatgatgccccaattggcattatcagaattggatttttttctgaagctaattagttgcagttctcccagtaatgccaggactctcaagaactccattgtccctcctaccctcccttgcttcactcctggcttggtccattaattttgttactacttgtactgtaggcatttcagtttccaactgctgcttttcagtaagaagcaggtctattttttctaggatattaggtcttccaagaaacacaatatggatttgcacacaaaagataggaatatgttatcaacacaggcttttgaatgatttttatttaatcagtcttgaagagtggctattacagtttcacattttctctctgcataggaagatgagtagagggataacagggagtcttgctataaacagaaatggatgatttttttttttttgctttraagtttgctagtttggtgaaatcacatctgtgtctttgtctttgaattctttcttacaaagaaagaaaatcgtgtgtctacagggggaaaaataagaaaagcaagttcmgacaggcttaagtaaaattacattcagccctgtgagtggcttcctgggaatgttgaatgagcatttttgacatagactgttcacacctctctcaaatgataaacgatcaggaatgagataggccttcgtaaaccagagtcagctttctctcagttccaagagaagagccattactttgtttcttttttttttcttcttcttcttctttttataaaagtggatagcttgccatcacagcagtgtgctttctttgatgacctttggtaagaaacgtatcataattgcttcttaaagctacagaccactrtaatccaagaacaacattttagatacagtctgtgatacargttaccctgagtgctttggaatcccagtcctctagagtgattctcaaaatgtggtcctcaggctagcatttggcatcatctgtgagtttatttgaaatgcaaattcatgagccccacccagacctagtgaatcagaatctctggagatagggcckgggaaactgtcttactctgttttccaagcaatacttacgtgcattagtatttgattaccatattttagagtacttatggtaatccacatggagttaccaggtagggctcaggtaactaagccacatctgtggtgaggccatagtgccccatcaagaaaacattgcactgttcctttcatcgcttttcaatctaacggaactagggtctttgggcagtttctcctcagccagaaaattgtgcctaaggaattagatggcaaaaacaaagtttcaagacaatggagtcagagtttttcttttctttctttttttttaaaatttttttttattatactttaagttctagggtacatgtgcacaatgtgcgggtttgttacatatgtatacatgtgccatgttggtgtgctgcacccattaactcgtcattcagcattaggtatatctcctaatgctatctctcccactccccccacccaacaacagaccccggtgtgtgatgttccctttcctgtgtccaagtgttctcattgttcaattcccagctatgagtgagaacatgcggtgtttggttttttgtccttgtgatagtttgctgagaatgatggtttctagtttcatccacatccctacaaaggacatgaactcatcatttttttatggctgcatagtattycatggtatatatatgccacattttcttaatccagtctatcattgatggacatttgggttggttccaagtctttgctattgtgagtagtgccgcaataaacatacgtgtgcacgtgtctttatagcagcatgatttataatcctttggatatatacccagtaatgggatggctgggtcaaatggtatttctasttctagatccctgaggaaccgccacactgacttccacartggttgaagtagtttacattcccaccaacaatgtaaaagtgttcctatttctccacatcctctccagcacctgttgtttcctgactttttaatgatcaccattctaactggtgtgagatggtatctcactgtggttttgatttgcatttctctgatggcaagtgatgataagcatttttttcatgtgtcttttggctgcataaatgtcttcttttgagaagtgtctgttcatatccttcacccagtttttgatgggattctttgtttttttcttgtaaatttgtttgagttcattgtagattctggatattagccctttgtcagatgagtagattgcaaaaattttctcccattctgtaggttgcctgttcactctgatggtagtttcttttgctgtgcagaagctctttagtttaattggatcccatttgtcaattttggcttttgttgccattgcttttggtgttttagacatgaagtatgaggccggcatcatcctgataccaaagcctggcagagacacaacaaaaaaagagaattttagaccagtatccctgatgaacatcgatgcaaaaatcctcaataaaatactggcaaactgaatccagcagcacatcaaaaagcttatccaccatgatcaagtgggcttcatccctgggatgcaaggctggttcaacatatgcaaatcaataaatgtaatccatcatatgaagagaaccaaagacaaaaaccacataattatctcaatacatgcagaaaaggcctttgataaaattcaacagcccttcatgctaaaaactctcaataaattaggtattgatgggatgtatctcaaartaataaragctgtttatgacaaacccacagccaatatcatactgaatgggcaaaaactggaagcattccctttgaaaactggcacaagacagagatgtcctctctcaccactcctattcaacatagtgttggaagttctggccagggcaatcagcaggagaaagacgtaaagggtattcagttaggaaaagaggaagtcaaattgtcactgtttgcagatgacatgattgtatatctagaaaaccccatcgtctcagcccaaaatctccttaagctgataggcaacttcagcaaagtctcaggatacaaaatcaatgtacaaaaatcacaagcattcttatacaccagtaacagataaacagagagccaaatcatgagtgaactcccattcacaattgcttcaaagagaataaaatacctaggaatccaacttacaagggatgtgaaggacctcttcaaggagaactacacaccactgctcaatgaaataaaagaggatacaaacaaatggaagaacattccatgctcatgggtaggaagaatcaatatcatgaaaatggccatactgcccaaggtaatttacagattcaatgccatccccatcaagctaccaatgactttcttcacagaattggaaaaaattactttaaagttcttatgggaccaaaaaagagcccgcattgccaagtcaatcctgagccaaaagaacaaagctrgaggcatcacactacctgacttcaaactatactacaaggctacagtaaccaaaacagcatggtactgktaccaaaacagagatatagaccaatgggacaggacagagccctcagaaataataccacacatctacaactatctgatcttagrcaaacctgacataaacaagaaatggggaaaggattccctatttaacaaatggtgctgggaaaactggctagccatatgtagaaagctgaaactggatcccttccttacaycttatacaaaaattaattcaagatggattaaagacttaaatgttagatcttaaaccataaaaaccctagaagaaaacctaggcaataccattcaggacataggcatggggggagtttttcttttctatagaccatcttcccaccaccagaagttcttttgattctatgtaaaaagtctttgtcacttaggaggatgaatcaggaaccttargtatgtggcaaaacaattaggcattataatgaaatcacatctcttttcaaaaaagagaatgacattcctttcagagtgaccagggctgggcatggtggcttatgcctgcaatcccagtgctttgggaggctgaggcaggaggatcgcttgagcccagaagttcaagaccatcacagggaacacagtgagatcccatttctacaataagttaaaaaaattagtcaggcatggtagcatgcacctgtagtcccaggtatatgaaagactaaggcaggaggattacttgagcccaggagtttgaggctgcagtgagccatgrtcatgccactgtactccagcctgggtgacagagcgagtccttgtctcttaaaattaaaaaaaaaaaaacacaactaaaaaaagaatgagcgggaggaaaaatgacctgatatatatatatatatatatacacacacacacatatacatatatgtgtgtgtatatatatatttwtatatatataaatatatatatatawatatatatataaatacaaatatatatatatatataaatacctacagatgcatcaaatatcaattcttcaagaatgtattggcctaagatttacaacaacttttataagacaatagcctaatttactaaccagtttgtatgtgactctttctaaaggtgtgtctctatcttgagttctctatgtgttaagtgattttattttcctttgcctattctctaaggtaaataaaaaagaaacagttgttcaaggagaagtttgagatgataaattgttttttaaagattttgttgttttcttcagcccactatttaaatgattcagtgagctacttcattgttaagtaagtggagacacctctttttcccgagaacataacttccaagaataatatatttattgctagacatttttagaaacttgtacagttatgtgagtaaactccctgcattgacatggtcaaacttactggtagtacagccaagaaggaatctgaagagggcaaaggtatagctcatcagtgattcatcgaatattggtgaatcattcagaattaggtcccttctgtgtaaaatggccttttttttwaattcttttctgtctcctgtatcaggtaaagrtagtgatatcacctggttctaccttatgggactttgcaagaggtacagcagcaagttctaagaacaaaagcaaaaacaaaaggggtgaacatgctgatttccaagaaaggatgactctttttaacttgttattatatcacacaagttcataatacatttctcttgctgggttgtaatttggtagagtatcagaatcgtatgccaacataaaacccaaagcatcttaaattctaagtatcacttattgccctatgttatttgyactttggttgagttcctccaagctgagcaactggagagaggttccaggagagtgtgtgaaagagtctactttattaaaaatatactgaaatgacagattccagagatttattgccccactgaatattgcagaaagacaggcaagaaaaaaactttggatttatataaattttatctgtttggttacctttggggagtctttgggttatatagtttggattggaaatttgacataaatgagtttacatgacctgtgactttgggcaagtttttaacgctgaggttcctcatggtaagatatcaatagtactttataggattgctgagcgaattaaatgatagtgcaggtaaagttacaggcgtaggacctggtacatattatacctcaattggtggcctctcttattatttagaatgttattatttggtatgagccctatttgacatgcctacaattcctttcaaaattagaatggcactgtgtaaatgatttcatttatataccatcttccagatagagacgggtaacagggcactcagaatgacatgtcatggaaatgtaacaagcccaatttccctgattgggagaaaagtctagtcttgggaactgatgactgggaagataccagttacttgtttgaaatttggatagggaagagaagtggaccaagggcagcaagttgttcctgaaatcattccaagaagcctaggaaccattcagtgatttaagaagtctttgacttgctaatggacaatgcgcctacctctgttgtgcatataaaatgagactctgggggctaggttggcttagaactggcaagactgtgactgaggatgaccagctgtggggctgtcgatgtgaagtaggggtgagagtacctcagtaaatggtgagaaagagtaaaggattggaaacatgatggaacgcagcatgaacataaacacagcagtggttcatttagactggcatgtgcatctcttgcccacagcacaaagaaagaaggggtgtacttttgaacaagcccaaagacacttgcatcttttgtttcttgagcagcaagtctggaatattccttccgttctaaaatgatatatgcctgcacttctgctctttgaggagcctgggagtttagaaaagagtgattcttgacactcaagggttgggagacacatgatgcccagagagaagtgagtgttacttgctcttttcccaggctgctgttctggtatttaggagtatcagaagggagatgtgcctggaggaatcactgactgagaccaggaatcactgactgatgactcaggatgtcatccatctgatcacctgtaatccttcgaggccgtacccaaaactaaaagcagggttctgaagtgggtaaccggggtgggtagagcttgtgttgctagagaatcttgcctctagctacccaaggctttgcacagagcacagtagaagccctttattcaaatcagttaggacttctagtttgtcagttgattgaaactcttggctagagcaamaaatgttgctttaccaagaaataaaaatgctatttaaatgtttttaggacattataatgtgcatctgtttggtaattcttggttctagacctccttaaatatgaattgactggttggagtctcacctctactttctcaaataaatgttacccactgtgcaccagtgatgattccttcaaagtggagtaaaaacttggatgcctgcaaagcagtctaaggcacagttcttctgggcttttgtaatcatctttctcaccttgtaaagatttctccatctaatataaagccaatcactctcaccaattcgatttatctcatctttcgaaaaaagtaatggaagcaatggctctattttcttccgcatatttcatcagtctcttatattcttaaatcatgtaaatacactaaaagtatgatgggtttgggaattgatattttcctggtaaacatacarctgaggtgatggaactagattgtacagtgttctagaaggtagtctaggcaattttsgtgttctgggtaccacggacatcattatgttctcaaaggaattgcagaggtttgatttaacccaacaatgtggttagttggtgatcagcatgaatgttattttcccattgtcttagtaaaaaggggattgattattaaacaggaatagttctctttaaatttgaactgtcaagttgttatttaagttaacagtgtgtaatttttgaaggctgttgtgagacctcagttcttcttagtttaaaagaaattaaacaagrcacagcaaaggatatgcagcacagagtcatttactgcaaaagaaaagcatattttgaaagttaagtgcggaatagacagtacaccctgagagacagagaattcagggtgggctgcttgtaaggatgagacagcaaagactggcaatagggagttttkgggagttttacatgattattcataaggaggtggaaagcagtgttactagtaagcatgttctgggtggtcgtctggacgcacatgtgcagtagctgtacatgcttgtccatgtgccacatgtctcattagcatcttaaatctccacccatcggtgtgtttttcactattatcatcagcacagggtcagtctgaggacaggtgaaatcacatgtgcatgctccctccaggggaagttccctactggagatagctttgcttgagtgagctggactacggtgcaaatgctggggcttattgttttgactgtacggttgccacagttgccatatcccaaggacatgattacttccttgactacttatcctgcctcatgtaattatatagaatctttttatataatatgactatatgaaagtttacatatgtttatacaatcatactgtatcttaattttaaaaaatgtaaattaccatgatacattattctaggtagctgttgttgaagtgtgtagatatctattaattcaagtgactagtcatgattttggtgcatggggtagagaatatcttaaagtatgtcagccaaacacctattaactccatatttttagaatataggtctggatttcccctgaatttagatgttgattgttttgcatgagaaggcctttatttagtaacataaatatgaatttatatcttagaactacrtaccctcatatgacatctgattatttaattgccatgtgaccacagataaataacacaacctgagtatcgtttacctaatctatataatgattattaaaaagaacacccagcttatagggttgatcattgctggaatgagatgatgcatgtaatctctgagcacagtgcataggatgtagtaaactcttaatacacagtagtgatgatgatgtgtcatggcgggcatagagcaggattcagcaagtttkggctaaatgaatgataaatggagctttacttgcttttctctaagttaagtgcctgacaggaagscctcctaagaacatatagagagaattttataacttaatggagtatttatttatggttttaatgtattgtataatcactcccttttattgtaaatatgccttccttctctctgcctcrgtgacatcactgtccacattaagaaaaatccttgcctggctccagcagtcttgcccacatgtctacgatttatttatgccaactattgatcaagaacatcagtgatgggtttttaaggcatacgattttctcagtttgtttgccactttgcagaatttccagaaagttgtactaaactttaggttttagttggcctctcctgtgaacagggggaagagattgaaaacataatcaaatcaaataggaaagtacaaaatacgaggtgcttgttaggtgctgttctttactttatttatacttggattttatcttttcctgtaggctgtgtagtttaattcacagcaaaacattttgtgaagtagatgggtagttaaaagaacctcagaccaataatgtttttcctagacattaggtaaacattttctaatgatgattcattttaaaaatccatactttgtaaaaaatgaataaaatttgacctgagttaatattaatgccttagaaataaaaagaaacctcttttggctcagatctgtgaagatgagcagcgtatgttgcttagaatatagactccatgaaggcagcgttttttgtctgtatggccacagacattacattcatgatttaataaaaaatgattttttaaaccaacaacttgatttatgaagaatggtgtacacatctgctgaaatatcaadcatttcctttacattggtgaagaaactaaaaggctaatatgtctaggacatataaaagcctagascttctgttggtctgttttattcactgctgtgtcctcagcacctaggacagtggctggcatgatgggcacactgcatatacttgtgaaaaattgttgaataaaagttactcaatctgaatgcctatcattgataaactggataaagaaaatgtggtactggctgggtgtggtggctcacacctgtaattctagtgctttgggaggccgaggtgggtggatcacttgaggtcaggagtctgagaccatcctggccaacatggtgaaatctcccatctctactaaaattacaaaaattagctggatgtggtggcgcatacctgtaattccagctacttgggaagctgaggcagaagaattgcttgagcccaggaggcagaggttgcagtgagctgagccaagatcgtgctactgcattccagtctggatgacagagcgaaactccatctcaaaaagaaaagaaaaaagaaaaaatgtggtacatatacacatggaatactatgcagccrtaaaagagaacaagatcatgtcctttgcagggataaggatggagctggaggccattatccttagcaaacgaatgyaggaacagaaaaccaaatactatacgttttcacctgtaagtgggagctaaatgatgagaacacatggacacatagaggggaacaacacacactggggcctgttgtcagaacacggagtgtgagaggagggagacgatcaggaaaagtaactaatgagtactaggcttaatacctgggtgatgaaataatctgtacaacaaacccccatgacacatgtttacctgtgtaagaaacctgcacatgtaccccttaacttacaatataaaagttattaaagtcttagatttaagtattaaaaaacaaagtaactcaatctggcatttatcttcaccctgaaaagaaaccaaaagaaggcctaagcttttatgtgccctggaggtattagccttttagcttcctcgccaatgtaaccaaagtttactttgatatttcagcagacgtgtgcaccattcttcataaatcaagttgytggtaaaaaaaaaatcatttttattacgttataaagtatataattccccaatagtacatcaactcctcaaycacatcaggagagttgttaaaaacwgccttgccatcatatctgaatttttcatttacaaatcaagtccaataacactaagtcatttaaaagttagactccctagtaatgttggtggctctatttgcatactttttctattacaaatgtctgtaaaggactggaagtttatggtttgcagttacttcccacagggctttggctgaaggctagtatgaactggatagcctacatttcagcacaaatcaaagagaaaaggctgtgcatgctaatggcctgctgctggcccagcacacagtcatctttgctgtgaagtggctgataaggggtggtctgataaggatactttgtattttaactttagatttatttgtttggagacaatgtaaaataaaccaaaaaagaagatctttgatacatgccacagtggagaaaaaacactgttacaaatgatamctgttttctttggtttaactatgaatgttgtagttagtaagatgttatttccaaaatgacaacccaaagagtagaaactatgatttggtgggtgggcagcaatgggtaaagaatgaaagagatattttaatttaatgggaccaaggaatatactgtaaaatgtttcaaaataattaggcaaaatgcaggaggaaattgaagagaaattattctgatatctctttggtataaagcaggcatttatytayggtaacactagtaccagtctgtcaagacatttaagaaaatggtttgaaaagacagtttgaatttgttattaaaacctgaaatagagacaaggtaatgtacatcaggtagcattttcagtggcaaggaaatgtgacattactccagaggtcctggtgggggactaggatagtgtgatcattctcaccctgctgtgtgagattgatgtaaacctcaaatgtatcccctatgcaaccctgccatccctcatctcacaggatgaaggaggaaagcagggaagaaaatgtgtcagaaagagaaagacagagttgtactttttattcctgctgagtatttaacttgcctattctttaaaagtgactattcacatatggatttactttgagattttgctgtcaatagtgatttggaagagaaaatatttattttctaaatgctgagaggtagatagtgggatgtaactgcaaaagattcccaaagggaaatgcaaattttgagagaaacggtacagacaaggtatacagtaaccacccactgtcattaaagtaattggttgaatatggtataataaaagggtccaattttaatgtattctgtggtacataaaaataagctcaaagtgaaacaaagatttagaagtaaaacctgaatctataacgtctgtagaaggaaatggggaaatctccttaacatttgtctaggcaataatttcttggataggacaccgaaatcacaggcaccaaaaatagacaattgaaactacctcacactgaaatgcttctgcacagcaaaggaaacagtcaacagagtggaaaagccacctatggaataggagaaaaaatgaaccatacatctgatgcatctaatatgcaaaatatgtaaggaattcctataactcaatagccaaaaaaatccactcaacttggttacaaaatgagcaaaaggacttaaatagaaatttctccaaagaaacatgctaatagccaacaggtatatgaaatgatgttcaccattactaatcatcagggaactgtgaatcagaaccgcagtgagaggacacctcacacctgttaggatgggctgttgtcacaaaagcaaacccaaaacccaagtgctggtaagtgtatgaagaaattggaatccttctaaacagttggtgggaaaataaaacgatgcaatgattatagaaaactgtatggagatttctaaaattttgaaaatagatttaccccatgatctagcaataccacttctgagtattttaaagaattaaaatcagtatctcaaaggatattagcactctcatgttcattgcagcattattcataatagttaaaatacataaacaacctaaatgtccttccacagatggatatataaagaaaatgtgatatacatgtatagtacaccccccacatatatatatatgaacattattcaccttgtcataggagataatgtagatgaacctgaaggtcatcatgtcagatgatattaaccagtcacagaagtgcatgattccacttatatgagaaatctaaaacagtcaaattcaaaaaagtagaatggtcattaccaggggatagtgatgggggcagggatgaatagagagtttctgtctgacagatataaagtttgttatggaagatgaactattagttctagagatgatctgtgtaatgtgtgtacagttaacaatattatctagtgcacttaaaattttcttaagagtatgtatcttaagtgttatcacagtaaaaaaaaaaaaagacaattcktctagcaaatgttttgatgtgttttaatcttataagtaaaaaacaaacacaaaaatgtgttttcaaaaaccataatcaaatataaacaagtataggtgatttgatgttartaggtgacaacatccaagaaaagcacattggtaggttggcaacatgttaattttactcctgtcaccaatgcttcccccagtagatccatgtgagctatttgaggcaggagctatttttcataaacagtttttaaggatcctatgacccttctcaattgtttagctgtgaraattagaattatgtttatttgtaaattgcctgcatgctagtagtctcttgcttatgaagtactgataagccatcctcagaagcttttaaaagaacctctgtgttaagataaaaatgctatatagtgatatatttaccacggtttcactatacactcagtttttatcactatcagtatattatagatgacgcatatggatggaagcatgttccctcagagctctttccttttcattaataattgtagtagctatctagattaggtccaacactcatttattggatgttgaatgttgagtgcctacaatgtgtcaaaaactatagtcagtcctgagaattaaaaataaaggcccagactaggcatggtggctcatgcctctaatcccagtactttgggaggccaaggcaggtgcatcgcttgagctcaggagttcaagaccagcctgggcaacatgatgaaaccttatctctacaaaaaatacaaaaattagctgggcatggtggcatgtacctgtagtcccagctactcaggaggctgaggtgggaggattacttgagtctgggaggcggaggttgcagtgagccaagattgcgctactgcactctagcctgggtgacagagtaagaccctgtctcagaacaaaaacccaagcaaacaaaaataaaagccctactgccaaggagctgtaggtcagtggggtgagcagaggaatagtgtatttgcatgtttcctctaataaaactatgcaggagaccacggatacacacatggggcaacagttaattttgtctcagggtggccataaaaagctactaagagaagactctgagctggacatgagagagtctgtaagtgctcaccagaagggggtgtttgagaggcgttttgagctgagggaagtttgtaagccaagttgcaggatgtcagtgaggtgcttaggaaatgcagactcccgactttggtaagatggctttgtcatttactgcatgtgtagccgaggacaagatagaacttgagccttcrtccttcaccagtaaaatactaaatgatttgaaataattaaaatatatacttaaataatattgaaagcataaacattagttccctttcaagtatgtgtgggaggtggggagatagttttgagggagctgtcrgcaagagataggtcagtgaaacagccagcgacagctacactaagcatcctgaattgattctacggataagagtgagcsagcagtggttctgagttgggagagccyctgctttsctataaaattgttaattgttatccagtttgtaaagaaaacttaaatactaaatcattaggccaacatcataaaaagaaatgatggagcaagaatgttgcatgtaagggatagaatgaagttaatggtcattcttttttttttttcttttgagatggaatcttgctttgtcatccaggctagagtgcagtggtgcgatctcagctcactgcagcctctgcctccagagttcaagctattcttctgtctcagctcccaagtagtttagaccataggtgcgcaccacaatggctggctaatttttgtatttttagtagagacagggtttcaccatgttgtccaggctggtcttgaactgttgacctcaagtaatctgcccactttggcctcccaaagtgctggggttgcaggtgtgagccaccgcacctggcccaaaaccaggactgagaaaaaggagcaatcttgctttagagtagttgagaattatcactgccctgaatctcaccacccttgcaactattggcttaatctcaaggaatgaaaactgmtggaagcaatagaaagagatctttaattagtagagtacatcgaaccttacatagatgtaatctcccaaagttcagtaaaagcttagagtcatcaagaagttggtgactgttatctaaacttgatggagataagwgcagaaaacagacataaaaaaataccagatgagagttataaaaatacagtgaagmgtgaagtatcctgccttagagagagaatgatataagagaataaaatgcagtatttttagctaatgtgatttgtaaaagtaacagtgcaagaaagcagtttatggcagaaaaaaaaatattgcccttagacccacaatgaaccagaacaaaatgggataggctgtgtaagaatcaagttggctcagaagtaagacacctcataaaggtactatatttagaattttgaggtggaagtcagaagtgggtttctgtattatacttctgtggttcttcctctctgtggaagaaaaaaggtaatgtttgttcagaaaatggctactgtgttttagacacagtgttaagtgctagtaagaggtacttagtgaaaaaatcacttttagacacttgagtaaactggttactcgctctattctccagtggaatgcaacagtctcattgtatcctcacagctccacagagcagctgagggcatctttttaatactgcaaatctgcaggtcagaagacggctctgccccatatgtctcattttggtgccatgatcatggctttgtgtttgcctggaaagtgtatgttcttctccagtcagtcagtatctcccagaggtacaagcagaaacttcttaaggcacgggcttaagctggtacatggtcttctgttgccttttcatgcgagtcacatgaccaagtccaacagtgaaggcagggaggtatgcttcttccataggtgtttaggaaagaatggaaatgcttgctcaccaatgacttcttccacctcctcacttagcctcttagtacctatgcttccacacctatacagtgagtatattgatattttagaaagttgttgtggggataaagtcaactattatacataaaattacatgtagggttctcaacaactagtaaccttttattctctcttctttattgttccatcctcatcccaaccacattgggtttatgggttccctccatcaccctgcagagccttattagagcatcatctatcactgtgtgatagatacccttaaacagggccgggccatgttaaacctgctgcctggggaggctcttgccagggtttgcttgttctctagctggtaaggccatctagaacttcttttgttttcccatccctcatgggtctgaagttgttgtgcctgttcaggaaattcctcctgacttccttccttctttttgcttgggtttctttgaattttgtctccatatttagctcttgctcctttctgggacagtcttccaatagaattttttaatgtcttactcaaatcttgtccaaagcgtaaccatttctaggacttttttttatttcattactattgataagtggaagaaatcagtgaaatcttttaaaatcacttaaagaaggtatttataagagttttaactgatgcctcctggtttakttttcataaactagaccaaaatttttatgaatgtcgtaccctcagtgtttggcaggaaataaagttgtgtcattgttttgtactcaaagtaatagcctgcgaagtttcctaagagataactaggtctcagtgctgtcctctctttggtaaggtggtttgaagttttgcattatatagagagattttcagctgcactaggtaaaagctagattttcaactcttaacaccttaaggccaagcagartaactgaaagttgtcaagcatatccaattatttttattctttccctttgttcaaaagaatcccattcatattgggtattttctttgggttgcatgtgatgaggtgaacaacactagtatctgcctctctcccgtaagaaaattctaactgtcctagaagaagatcagatctcagtgatgacatttatgtcccaagggactttctcattaagagtaaccttagcctgctggggcatcattgcttcactttgagtttagctaagatgcagcctaccaattgcatttacccctgtcacttgcttctttgtcctttttcctttatgctgtcaagtttccattttaacaactcttcagtttctttatcaatgtttattgctgaatgtggtagtcagtgttcacagaaagaaggataaacaagcaatattgctaatgttttccaagagttaacaatctggatgcagactcaaaacgtgctctgatgaagctaccaagtaggacattgattcagtttaccctgatggttcagtaaagggatataggaagaagaattgaaggccttgttaagctttcaagtccgattgacagggaaatgggtcctattgccacgattccaggtaataattcgaacagttatcattgattggattcctttacatgtaatacaatagccctgtgagatagatgttaccttctccaataattgaatgaggaaactgagacccaaagatattaaaaatatgattaggtcattgcaattaagtggcagagctgagattggaaacttacatgtattggactttgagagccytcttggggttgtgccaatttcattamctttggaagacctacttgtaaatacttagagattttgaactaaggttttaataaattaggaagaaaaaggccaacctagtacctattgggaatagaaaagaagccttgaatataaacttgttaaaacaggagttggccaattattggttctaatggaaacaggagaggaagaatgtcctagtgatgtttacaaactaaatgattgggaggatggagaagacattaacaggactggcccagctaggagggagagatattgagcaagaggtagatggggcaataataaggtagatttgggagatatcaaatgaggagtttggtagtgcccacatggaattgaccagcaggcagtaggaaaaataggacatgacttaagagagaagagcagtctaaaaatctagcaataatcacatatagatggttattaaagtaactcaattaggcataatcactttggagagtgttgagaaagaagaaattccaggaaaaattaacccacatttaggtgttggatcaagaaaaaacagccagaggaaaagacagagggaaggcagagggtacgggagattgctattgctgtgtaatacattaccacaaatgtagtggcttaaagccacagaaatttattgtctcaccattttcatgggctggaatatttaggctggaacatggcatattttagctggggtcctcagctaaaggtcctggaaggctgaaatcaaggtgtcagttgactgtgctcttatctggagscttgcttgactagggaaatacccagttccgagctgtctcctgttggcagaatctgtttccttgtgattgtaggactggggcacccattatctttcggctactgcgcagcgttcattctcagctcctagaagctgctctcaggtctccgccacatggctatctcttgaagccctctcacaacttgagagctttctccttcatggccagcagtagaatttcttttaggctttgaattatttcttcctttaggaagaaaaaaaagcctcagccccttaaaatggctcacctgaataggtcaggcccacccaagataatttcccttttgattaactcaaagtcaattgattttggcatcctaattacatccgagaaatccccttacctttgttgtataacataacctagtcacagaagtgtactccgtcttacccaagtgttgcccatacttaagagggaggaattatatgggttacatataccagaggcaagaatcttgagggacatctcagaagtctgctgaccaaaagtcgtagagagcgctgtctagtaaagcaatttaattgaacatgctactgcatgccaagagatgtaggtatgaggaagagcagtccttacttctcgaagccaaaattctgatggcaatgacagagcctaggaagtagaaaattgtgatgatcaaacggtgaataatttgtaatgttctagagagrgtgttgactaaggagaaatgggagttggatttagattttagggtttttgtagtgctttctgtagaatggtaggggttggagtcaggttttgagctataagggaatgaatgaatgtgagcagtgataaatagatgcatatgtagaagagtctaacattttttacagggagtttacaaagtagagactatttatcatttttaatctttagtatggtctagacctaagaatgtttgtagcagtagggagggaattcgtgggaaggggaaaatgaacatgatatcatccgtyactgcttaaaccgtcctaggactttgggagactttagagcaayggagatctttctcttctttcaattgtatttygcccatttaatacttccatggcaattattgtatgccaggccttatttgcaagcacttggcaagtattcactcacttaatttttacaatcatcatgtgagtcaggttctattttattcctgctgaaagactcataactagtccaaggtcaatgagcttataagtggtagagttgagattcaaatccaggaagtctggctctggagcccaggctcttgaccattgcattaatacaaatgctcttttctacatggttctgttggtcatgacttgtgtgaggccttgtgacaccccttgtattgttattgctgtgcacataaattctctgcatattacatatcaattccccagccaggtggtragctgctcagagacaaggacatatttccataacacttttccttcttcatggcatcttatatgggrtggctatcaataaatatatattgatttgatttaagctgggatcctatcatttacttcctcatttcctttaatctctattgattataaaattaattgggtggtgtgtaattctgatttaactacttagcctgtaactataatttttatgacttttaacatcatgataaatctgtgacctttttgaggagtttcttgctttataaaatttttcacttttaaaaagtggatgaatacatcatagttctgagaactattttctataaggaaaaaagggatgcttccctgttggccctttgggttgtgttaaaatcttcattttctttttttaactgctaggttcaggggtacatgtgcaggttggctatatagttaaattgtgtatcataagggtttagtgtacagattacttcaccatccaggtaatgatttcacatttgaatgatggaggcccagggtgggagagaatcatggagttgagtagaatttactgaacattggagagaaagatcatctttggcagtggtcttggctttatctccttctggtttttaatttttgtctttgtaaagaattaaacaaaatcattgcttctctattagtgccaaccacagttcataattgagccaagtggccatttccatctgaatagtcagccctgtattcacttccactgcaggatgacatttcccatcccctcctgtaggagggtgcttcagatagttgcagtgggttcctgatagggatgtgttgcaaccatcctcccttgatccatgtgtttctaccacctaggaaggcacgttcagctaatgtggtttttacttgcctacctgtgtctcagaaaggctcccaatttgccccacgcttattgcaaaagtatgtgccataatgttaaagggaagataggattaaaatccctttttgatttattaatccatgcagaaggtgactactgataaaaacttcagagcctgtggatcagttatttttgtttgatcatctatatgcactacagataaagaaaacaaacctcattgttagaaatgacaccccacaatgggggttggattttatagcatttttttttcttttcacaatgctacattaaaagttgctcttctatgttcttcttcaaagcacttgtacctgaggtaagcatcaagatatttatcccctgctgactcttcagctacatttgatcaacaacaaagagaagacagctaattttatctttcttccatgtattttgggcatgtttgtgtgtgtgtgggtgtgaaatgcacaatgcatgtgtgagtgagtgtgtggagtgcatcagagcacaagagattgtgactgattggaaaccaaagctttaggatgtagaagtttaaagatgaccagacaggacagagtggagatgcatttctgacttyagctttgtaagctcttcaagaaatacattttgtttacttttgtttctctttgaaaagcagtctttatctccctgtatctaagagctttgagatgtatgtgagttcattttctaataatctcaaaacatgttctccgatattagccagtattttccccagmctgctctctgtattgagacgcagggtagtctagtggctaagagcactgaccttctgttcaaaccttggcttacagctgtgtaactttgggccaagtgatttaacctctctgaacttcagcgttctcatcagtaaaatcagtgttctcatcagtaaaataaaagtagtaatcaccattgtagggatattatagggttaaaggagttaatgttttcaaagtgcttggaataaagacctgctacacaaatggttccatgtaagtgtttacctttatcactatagttactgtagtacaattataatctaggataaaagcagaaagaagtacaacataaattgttatactatcagtgttttagtagctgtattacttttgggaaagaatgaagagaaaaggtgggggaaatgattttgttatggtattaggaaaactacacttaaaaaattgaaacaaatatttgctgcaagaagttagctaggggcactgtatttcctcatcctgccctgaaaagccacattagtgtggtagtttcaggtgtgctaatggtcagctgcattacttagctgcaccaggactggtagaaggagttggggtgagtagctttaacaatttttgaatattattgcgccattgccttaaatgcctgagaagtatgttagaccttaatacataagaaattagaaaatgtcattcttaaactttaagaattattaggggaaacattactaaacatttagtttaggctgttctttaaacacatcatctctatgaagtctaagatatctcattcatatcaatcagaaaaaaacctcactaattttcacatattctcctgataattatataagcatgctttagacaagctgttgagaaagcactgtttctcacgctctgtttttgactgggtatgttggttataatgttttatgtcatactcagaaaacccattgtagaaagttcaactgtgaaaggaatttgttttggatcattaaaaagtctgaatgtaatgtgggcttcagggttggttgattcaccagtgcagtgaaatctgaattctctttgtctctctactctaccatctatactctactctactcaaggacctgaattctgtctctctactctaccatctatagtgcttaattcacttgaggctggtccctcgctttgccatgagaggctgctggtggcaattgaggctgcctgttccgttgggtatgtctaggggaatgagaacttctataaccatattctgtcccattctaatatttctttttagtattaaagttaagatattataacatttttaaaaatacaagtgtaggtagagtatcttaagagtagatttcatctcaggagagtgaagagggtaatacaaaatatttgtattaaggagggttgggtctaccagagttggagagccctggcatagaaccatttaaactaggttgaagaatttggatctcattcttaagatgatggaaagccatgagaaagttttaatatttggagtttgtgatagaattttcattacaaaaagatcacccaggctgctatttgtggaagagattaggggagaagagtggtgtgtcccagagacttaagtcttttttctccattacraaatgaaagccatttttatgtctaacacctcactcgggaaaggcatgccagcttcartcttagttactgcaactgtctttttaasttacccttsagtttatgtaaatcagaattgattgtccttcaacaatagcaataacaacaacaaaaaagaatgttgtaaagaacaagaaaatattgattctttttaggtatgtaaaatgtgataaggtatgagaagagcttcaaaaaccttagactagtcatgaaaggaaaaagcattgaagtctatgccctgtttgggtacacatagacactttgtgtccatgctgcttgattccaagcattgcagggctggctatacaactgattcttttgcacaactgcttatacctaacagctttattggctgttctcaccttatgtgtcacacttctgtgtgcaaatctttggaatatttccatawgactctccagtatttggactttgggacatacgataaagcaaacatttgaaacctggagtcatatgggggcactcaaaaaatctgctgcttataarcaaggataaccaggctgagattttgatggacaaaattgacagctggtcagaaattttaaaatgcagaggcatttaagatgtcagaatatgccctcacactgcmtaagagctctccaatatgtccttttagctcaccctctaaaaatcaatctctaatcttttacctttgcctctacaaccttgctgcaggctgatagcgccttgccagtggagttttgcaatggcccctgaacaagtctctctgcttccgttggaagtatgcattttccatactcatcacatacataccacattctatacaacaaaagctgtattttcccaattctcaacataaaaataatagaacagaatgtcctgtttcaagttttccaccttaatattttcttaacaagaaaagcaaattgatattaatagggaaaaattggagaaagttaaggtcaaacctttaatttttctgggtggtactgagattttattataataatgctttatgtaataaatatcataatacttctatagtattaaatggaatacctaacaaaataaaataatactttatagcataattgcatatatcagcatcatgattttctcctagtaaaaatgttttcagttcatggatgaaatttaatgtcagtttttagcagtgtttggaaaaataattaaaatttctgggtctcaccatctgaaatgatctgaaaacatctgtgctattggaattgaacccaagtatgctaaaatgtttatcgattgaactaaatttcaatcgataaacatgcgagtctgtgagctggaagtgccttttctaggatggggttcagaatccagggagggaatgagattagatacagtaaatcagtgaaaccagaccaaacctggcagctaaacagttgaagtggagcaaaacagaatgtggagttaaagcagcagaagtcaagccataaagcaaagatggatagaggcagtagaaataaatgggtcccaaaccactgagcaatatttccaaaatgccaatgaagaaaagcagtttttctagccatctcatcaaaactgtcttcggccaaagctttattctctctttagaaaaaaaaaaaaaaaagtagtgggagaaatcttagttctttacagaggtaattgtgataactggtgaggaggagataaagacgagaaagttagaatttgaaagcaagagaggccaggaagagaaatgatggtaatacgatgtggggtggagagatggaaggcaagccagaaacaaagatgtatgaaagcatgtattttcctaaacagactttcattatgtgtgttggacagtaagcaaatgcaaacactgagctaggtgaagcagcatttataacacacatgacaaaccaatacttaaaccatttaaataccaagacactccatgcaagttttttgaaagtgaaccacatgaaaactgggcaatgattatgaatgagcagtttgccagagagaaatagccagtaaaaaggaaaagttaatctcagagaattgctaagtaaaataagatagrtttttytcccctgggatgtaggcacaacttaataatatatgacatccaatgctgttagaatgtggagaaatgctaggagcwatatatattgcttagcagtttggctgtatcattttaaataaaaaaaatacacatagcctttaacacagtaatctctttgtgaattattctgtatagataaaaatatatatacaaaattatttattgcagcattgttcacagtggcaaaaaaatgaaaacaaagaattttgatcacttgagactagttgaatgaactgtgttatacatgctatggatgattattaggtcattaagaattagaatgtatatctgctatggatgattgcacatgatatattgtaaagttagcaaagcaagttacaggaaatatgcaaagcatgatggccttyagtaaaaaagcctttatatttgtgattttaggtgtatatttacgcacaatgaaaggtattcaattaaaacacatcagacttaacattttgagtggtctgggaagagagaataagaaataaagcaagattcagaattgtctagaccccttgacccagaacctttagttatgtacatttataaggactagaaggatgtagaatagacttttgacatctgtagtgggattatgaatggttttatctttgtttatttcattttttggtctttgtttttctaaaatkgacatgaattctctaagtggtaaaagccaamtttatttcaaaacgaagaaaaagtatagatgatattatgcccattttacccattaagaaactgaacctaattgatacctttttaaagattccagctagtaaatagcagagatgtgcttgaagcccttaggtttcatcaaagtgacagcaacttatagatcaataagaaaagacaattaaaagtaagaaattagagaaagacggaactcttagcaaaaagaatactggaggaaaatacacaccacacatgtgctaatggaaatgtcagccaagagcaaaagtcaatgagcccacctcacccctagcattaaactgcattgagaattgttagaaacaagggcatgttggagccccttgatttgtaacagagtgaaaagctttcagaaatgtaaaaaacaattattttatttggggcttacagtggtggtgggaggaagcagagagamacagaaagtgccaactcttgcccttgtttaacatttggcaaattagaaaatgtaatgactaaggaaacaagcacatttcaaataataactgaggcaagatgaagaaagtactagctaagaatgatagagaggtgagtgttgacgacacttgctaagrcatgtgctatacggctattaaatcacaaccctcacgaaactttatgagacgggcactgttgtgcaaatgagaaaacagcagaagtactggaaaatgtagtaacttgtctaagatgacttggccagtaagtggtagatatgatttgaggcacacttgcctgactgcacggcacatgttccaaaccactgtgctctgctgttactgggtagaagggaccatgaaaatctctttctagttgtgaagatgatgaaggtcatttgggataggtacttcccattcgggctaaaaaaggcagaascagattgcttgtaagaccttgtaattctatatgttttcagatcctttcttgtgtatacaggaatctaaagatgcacatatgtggagttgggctattatagcacatttatttgcatcataatatgctatctaatgttcagcagcttkattttttccacttcatatgtcatagatgtctttccatatcagtacatgtagacattcaatatwtttttttttgacagtctcactttgttccccatgctggagtgcagtagcatgaatactagatgttgcataatattccatcacacacaattgttagtggatttacttttttctcattactttgctagactaagcaaataagaatgaagaaggatttaatgtctgctgccagctctgctcctctactaaaaaaaaaaaaaaaaaaaaaaagttgggagggatgttaattagttgactttcagttaactgtaggaagagttaggttcaataccatttaagaaaagcaagaaaaataccttggtaagggctgtctaatcgtctgtggtgtgtgtgtatacacayatatatatatatatatatatatatwtwtwtwtatatacacattcagatacatatatataggtttgtatatgtattaatatttaatgtatgaatatagcatgacataattatgtaaaattaatgttaatacatatttttaaaactaaaaatgagtagacaaaaagcttctctgaagcctttttgatttctgacttttgcagttttagtttgagacataaagcgaggttttagtgcattctgccatcwaaatacagtttagtcttttagccgagatcacaaaatgtaacaattagtttaatgcacacagattagcagccttttataatattaattgcaacaagaggcccatttatgtgccataaaatctaaaccttgcctgctttatctgtgaaacaaatgtacatctcagacattcgttgtcctttctaggaagaccctggtgtatttgaaactctgagttgatgacatgggagttcataaaatgctmgggagatttcggccatgtttggctgagaccttctgaaaggagacaaacatgtaaatgaagtcaagtttgcagacctctgggatccattacagcctgagatgctcttaacacataattagccagggccgttaatcacagttaacaggtgttgagtaatgaactgagacagggtatttgctgtgaccactttcttctctgatctggttagtcaggctaatgctgatcagagccccgggaacattctgaaatgtgacttgacaccatattgtcttgatgctgtcatctgcctcctgatcattgagaatgatgacattcagtataaaaacacagtaggaatctgttcaggagtcccccaagtgcttttaattatgtgttctttgagtttttctattatattttctttgcctcttttctcatttaagcctatgcctttgtcagctagttgttgaaagacaaatccaaacatttatgaacagcaaatggctccgtctcagcaaatggacccactgtgttctgtgatcacagaatgatgaaccaaaagtgacygacctcattctctaacgaattttttcactgccataatggtgcaagtactaaaacctctaagtccgagcatagcttgcatttttactgaacagttgcaacttgctttttcaccatgaagtttcttgagtatctcttacaattgtatgtgataaattattctttttgctaacatagtattagcatagaataacataatattccagattatggatgtagccacacttttttagccatttctctattgatgatctaatagttgttctcaaatttttttttttttttttctttctgagatggagtctccctctgtcgaccaggctggagtgcagtggtgcgatctcggctcactgcaagctccgcctcccmggttcatgccattctcctgcctcagcctcccgagtagctgggactacaggcgcccrccaccacgcccggctaatttttttgtatttttttagtagagacggggttttaccatgttagccaggatggtctcgctctcctgacctcgtgatcctcccgcctcggcctcccaaagtgctgggattacaggcatcagctgccgygcccggcctgttctcagatttttaacgctacagtaaatgtctttgtccatgcctccttgtgcacatgagtaggtatcactctaaggtagcagttrataactacagctagctgctaagccaaatcatgcctgctgctgttttgttacagcctgcaagctaagaaatgtttttacatttttaagtggttgaaaaaaaatcacgatatgaatatttgacaccagaaaattagataaaattcaactttcagtgtccataaataaaattttattaaaacacagccaagctaattcatgtatgcattgtctgggactgctttcacacaattgtggtagacttgagttatcatgacagactgtaaaaagtttcacaaactctaaaatatttactctttgtccctttacaggaaaaggttaccgaaatctgttctactgagtgtagaatcaataggaaaaaataggatttctgtatcacagcatttaaaacaatttttttaacaaactgtcaaatgcccttttattggttgtatcaatttatggtttatgagagagaatacctatttctcctcttcttcaccaatatttttatcctatgaatattgacttttttatgatcttatggggaattttgtgatattttgctgatttatttatttaattatttgccttttcaaaattctgattagattggccatcttgttatgtttattgggcctttatgttttttccactattttattaactgcatcacatgcctcttaaaagtaataatttaataagaattaagataacatgtattgaacaactgtgtggtaggtactatgccaaatgattcaaaaatatgtaagctattatatataatatattttacactataattataattaatggaattaatgttatatataattatattgtatgtaatwataatatataatagtattayataataatatcttatataaaaatcccaaagtaattattattattttatagatgaggaaagtgaggctcagagaaatcaaatcatttacccactttcacatagctaatccatgatagagactttttttttttttttaactcaggcgtttgtcttcagtttctacccttcactgctaaacattctgtctctgagcttgatgttggatagatatgtccagtgtaatatcagtggamaagactttaagttagggattctcttattgattcatatacttggttgtccagcacctgtgaatattttyagacatctaaggatttttcagagtctcaagatatgattacactctgtttctctttattttaaaaggccaaatcacataatgcttttaggagaagctgtggttgccaggaaatcgtttaatgattgtcgtagcttcacaaaggttagcaatcatgagctcagtatcattgaaataaatgtattattggagtcagaaaccctcagtttacattctggctctataaattatttggtacatgatcaactacagacaagttgctttgctgaatcccattttctcatcacttgagtattatttttttaaattgttaaaaactaaagggagtacttttaagaagtgcccagcagtacctggcacatagtaaaacttcaattatctctatcaaaatccataagagattatccatctgggttttgccatttacagggtaccatgccttaactaggtatttctcaaactgtggtccttaatctaccagcatcagaatgcctgaggatgcctattaaagtgcacattcccgggcctcacttcatctgattccatcagaaactctgaggatggctctggtaatctacaccrttaacaagctcccaaatgatttgggggaagactaaagttgagagctacgaaactatcaaaattctggtagctttctatctaacttttcaaatactaataaagattatcttcctttggaagccagttaaatgtttcaaaccagatgaggtcaagggtatcttctttacttataatttagatcattcttacaataattgcatgctcacatcttctactattaacagaaatgccttccttgccgtaatcctcagaaygctctatgtttgaaggcagatgccaccttttgatctcttttatcttctctattaaatatgctctgataacatcaggttctttggatggtagatactgtgttaatatagcaatgctttgtaaaaaatattgtttgattttagagttggttctttgtattccttgataaatttgctttcaggttcttagcttagaagagggagtaatagaggtccttcctttggcaaagataacagtagtggtcatagttgtcttgatcattagactcactccaagtcctagacaggttctgaatttggcactgatattgkcactgagcatgtgtcagggtatctagagcttccctgcctactcttccaacctcagctcaggcccctttctgtctcctgcactatgctctagtccggtaattctgcaaagtgtgcttcctagttcggtgacatcagcatcacctgggaacttactagaaatgcaagttatctgcctgactccagaactactgaatcagacactttggtgggtggggctcagcaatctagtttaacaagccctccatgtgattccaatatatgtttaagttagagctccatctagatcctagaatttggattcataaaggcrtttcctaaccactgtatgtaaatgcatttctctgtcatccacccgcctatcattccagtctttatcattgtgcctcatttatttccttcatattctatcacaatttgtagttacatagttatttctgttgtacttgaattttgtctgtttttctgactagattgtaagctttgtaattgctaaaaccataactattttattcaccaatatatcccctaacatgtagcacagtgcgtagcatgtggtagwtattaaataaatatttaaacaaatggatgagtgaatggtctgttaatatgaagtgactgaggttatgtttcttctgatctgcattttttgtgtgtttgcttttttgttattgacatggacaactacatactaccagtttcacagctaatttgtaagcagtttaaaagaataatttacaagccacatacacatacacacacacacacacacacagagttccctgcagtcaacttgctttgcagctttcaaatccaatggcaatgcctttaccactrtagacatttccatttcagaagagacagtggtcaatttacctaacatgcacttattgagaaatgaacatgtggtatatcagggtctggcaaccagaaatggaatttgcatggtacttcttaagtaagacctttaactctattggccaagtaactcctatgttctgagcyactttcattgttaaaatcagggaagtcgttgcatggttctctgcctttcttttcttagtgtttctctccctctctctctccctcttactcaccctaactccatgtctagtcctctgttcaacacctggctcagttgtacagtttctgaatttattaactctttgatgtctttcccttctatttaataaattttccttctgactagtgcttcaaatcttttctcaagggctggtgaaaattaattgctgtatgtagctaaaagaatgttcatttggtatggactcttttaccttctgtcaacatcaacaacatgtctgagagttagatctaggtttgtgtgttagtccattttcacactgctatgaagaactgcccgagactgtgtaatctgtaaagaaaaagggcttaattgactcacagttctgcatggctggggaggcctcagggaacttacaatcatggtggaaggggaagcaggcacatcttacatggtggcaggtgagagaaagcatgtgcaaacaggaaaaactaccacttataaaaccaccagatctcctgataacttacttatgatcacaagagcagcatgggggaaacccacccccataatccaattacttccctcctttgacacatggggattacaggtctctccctccacatggggaaattacaattcaaaatgagatttaggtggggacacagagccaaaccatatcagtttgagactctgctcagtcccttcctaggtgagaaaccttgagttacagtttgcccatctgcaaatgggctacctcctggtatggctatgaggaatgaagtgagatctgcagagtacctggcttttcttyggtggtcaataaatggcactctcacttgactaatactgagtacaattccagttatcttgggagagactaggaaatctgcagagagagggaaatgcgtaagagaggccacattaaaaataaaatttaaatcctggcagacagaagggrgatgatgattgtgaatctctagggacctaaatgtgaaactggtcttatttatttatttttgtcctcatacactattgagaaaattatctgctaatggactatgaggaacgcaagctagtacatgccttttcccccaccttcctcaagatttttattaaggaaatgaaaatatactgcctttgttttatttacctatgtatctacttacctttagagatgggagtctcactrtgttgcccacgctagactgaaactcctargctcaagccatcctcatgcttcagcttcctaagtagttgagactacaggtatgtgccaccatgtcctgtttactttttaaaactttccaagctaaaacactgcaggtgtattatcttctctgaagataatacaggtgaaaaaatgtttccccccaccccaggcaagagaaaatactagagtagacaataaatacaaaggtaccactgaaaaatgattttttaaaaaaacatgggttctgacttaacttttctaagaagtcatccagcagtttttctagagagaaaagtcagattcatacctctttgggaattgtttctactagatatttcagcattgtcaggtggatccagctccaatatatttgtggcaggacatttacatcttttgtattttgtccaagattatacaacatgtgaggtttgttgaaagcattttcttttttgttaacaaccatctggcacacttttttgtgacctaatctaaaacacaattttaagtttttaccctgccaatcacaaaatagaccaacatcctccctgtcatttgcatgatgtgggaaataaacaacgttcagctgagaagacacaatccagaaagatcagccaatatattgccagtaggtccagaaatacaatatacatagtaattagctgtggctgtatgaaccctacaacgtttggcagttcctcaatgttttgtaaatggctttttccctgggagtctgttctcccctaatgtagggttactgcccttctagacacattaagtggattatttttctactcaagtaagaggaggttataaaaaataatgtgccatttttccctacaatgaatgctgttttctttgttaatttccaagttgaaataagaagagtgtttcttcttaataggagtcaaaatgtcttattgaacagactggggagacccaagtcatcagatttaagaactagttcaagatttttctaatatgtaaagaatactggcatcagtatcatgtaattttgggtgcttgaatcttagatcgttctatgatggtgcagacrgaaatcctttatgtgtatttaacatatataacataccattttagatatataggtataaggggttaatgcttctccatctcctgtcaaatttgtctcctttacattgacatttggcacactactccaatttttctatctgcctcagggctcaagaattaatggtcaagaagaaagtacacatattttgcaaagaccaaaactttaagttctctgtcttattactccatataggaaagagaaagatcttgggctgtggtgtctgtgtttgcaggaagtcattaaataagcaatatgagaatggaagtgagcttggatgtayaaacctcttaacatttgaaaaattaattttagggtcttgaatcctctgtcctacttaatagttttccagggaaattatttagctaattaatctcttatatttttaaaaatgaaatgaagaatatactgtttatcttacatatggaaatttgactctgcattttaaatacaatttcatgaatagtagccagtatatatgttaagtagtcacccaggaggtgttatttgcttatgctaattacttttcaaagtaaaaaaatgctgtgaatacttkggaaatttatttttggcaattaaaatatttaaaatcacgtattacaattcttttatccacgataaaaccttgtgagaatttattaataattgcttgatgggaatgaaattaacctgtgtcagtcttataaataaaaatctccaatgtaaccagcttgtctgtcttcttttctcctctttagacatagactttcttttctttagtacccttaactccggagaggcttgcaattatccatacattacctgccatcttgtaccatctggataacttgctcatctattcctattatcttctcagtggttaatacctcacctagctttggcagaaatgcctgatacctccttgcctctctctagatgcagccagtaagcagcatcaaaacgtggcatcactttttgtaacttttacctatgctttcagttaaacaatagcaggttcttagtattctgaattatcctgtattttgcttctgtttccttagatttgtayttcttgccagaattattaaaataaatctgttagggtgttgtttttgttcgattttcccattatttaaggttgaatttagaagcttgcttcatctataataccctataagcttttaaacagatggaatgcatatctggtttttgagccatagcaaatattcctcatgctccttcaaagatacacccaggagaaaatctaaagaaggttygtgtagcatgggagtattgagatttgctgaatgaattgcattgttgtgaaaaattgagatttttgcattgtattttgatgataatctgtccctttcttgattaactccaaaatgacttattctctcagggaagtatgactttagatgtattactttcagcaagaaaatgttcagcttttcaaatggcttgagtaaactgtaactagatcactgacatcttagtctatggttattacaaggttagttggcaaaccaagttcctgtggggaaaaaagttaatacaaacattctaacaaaygtaatttctcattacagctataaatatccagagtccaaggttacagattcacagttaaagtaaatctttcaatttgtgcgatagatcattgccagctctggtaaaccaaatgatgcctatattcagctttacaagaacacgaactccacagattggtctcaaatttcactttactttaaatagtctttagaccttttctttcttctctctaaacaaagggttatgattactccaggatttatgttttcagtagtgcttgggttaacagtttctttgcttagaagtttacccctaaatgctctgaacctaatagccaatgctttaattataattttaatcaaggccaagtaaaagaactttgggcttatgatttacttttgtaacatacactatcatattcagtatttacaagaatccaatgaaatctgtactctcctgttttgctgagaaggagactgaggatcaaataaatagtaaggaacttgcaggagtcacccaactcttaagctgcaaagttggcgtttgagcccccgagtctgactccagactcgagtccctaaactctgtgctacagaattttttgctgtcatctgctggaggatatccattctttaatctatggcaatactcataaattctctcaggaaagccactggaattatggcttttgttttttgtttttaaaaaagtctattccctgattatggtaattgatctttcctttgagggcaagtgccaggatagaacttaatcaatattaaagtcatatttcattctaatttctgtagtatctcctatcacattagatcttaggaaataccaagttgataagtaaatgatacacttggcccagatgactgaccttcattttctgttgtcaattatttctcctcttaaccstcaacatttcttttctctccctgattgtctctcctaatctcctttatttttgtcttcttgagacattcactgatctttttcctttcttctttttcctcatcctctatcattgatcagtaaagaccctcaaatctcattgttttcacacatttctagtacagtcattccttgccccactgggttttagtggacttctggggtgtccacatcatgttaatgttgtggacgcaggtagttgtcctagtggatgccggatagacatatgtggattaggagttgcaggaggggtctgacaatgggactttgttggcattaaatgttcaagtctatgcctggaagctgagtttaccctcaatttgcatctcaagtctcggctgaggaagtgtgttgaaactgggcagcacgtgcagggtggttagtccagtgggccgttacaacctagcacttgtccaggcagcttccttgaaaagaatgtttatagaattaatgtgcctgtgtgttacacacatataaactgacctatgttttcaaaagttacatggtgagtgctggttgaaaagacttgaggaaaattttctcagatagctttaaaatgaggcatgtgctgtcattggtagagccttcgtttagtatgcaactgatacttgaaatatgactttctctgttagtggctttaacaggttccagtaatggttgtgtgatactcttcattttattagggttcaacagttcatcaaagggaagagaaatgtaggggctcctatttgaaaaatttatgtgtgtttatttacacataaatatgtacatttgggtcaggtgcagtggctcacatttgtaatcccaacactttgggagcccaaggtgggcagatcatttgaggtcaggaatttgaggccagcctggtcaacatggtgaaaccctgtctcgactaaaaatacaaaaaatttagccaggcmtggtggcacacacttgtaatcccagctatttgggaggccgagataggaggatcgcttgaactgtggaggcgggggttgcagtgagctgagatcatgccactgcactccagcttgggcaacaataaataaaaataaataaaatttaaaaaatatagtatgtacatttgcatatcctattcccattgaatattatctaaacttgcctatatttcttaactcagaagttacatgcatcctccttaacaagtgggtgagctagataaatctcaggggattaaaaaagattcaattacttatcttttggggtgaattgatgartaagaaactgtaatagcaaccctctggacctactaggcatctgtaattggtaggcttttccgacattttttccttcacagacttagcaaccgaagcacaaggtggattaaataaatgactaaataaaagagaaacagaaatatcatatcctggctccagatccatgattgtcagtagtgtgttacagtgtttttaccagtaacagttagcattgccttgattataagcaaacaaaagtagattytatttagcttaagcaaaaaaaaaaaaaaaaaaaaaaaaamaattattggcaggctttgagtagttcactatatagactaaaggatataggagaatgagacttgagaattgacagaaagcagagtagattggggtttatgcatagcaagtgctactgaacagtcttataaggacaccacgatttaaagaaataattttcagttcttttcagtcttctgtttattttagtcaagattcagaatttagggagaaatatctaattggcctgaattgggaaatgtgcccaattttggctacgacacatctgaactaaacagttgccaacattasggaagaaggttttgggatactattaccaaaaattcatggaatggttgggctgctggaaacaacaaaagtcaggtgtataccccaccccaccccacaccaccccccaccatccttctctagaatttggcttctccacaaaatctgacracaactttcaaatgaaagtccatattaagattgatctttacatgaaaatgattaacttgatccacaaaacatacagtgaaagcaaacgataaagaaaggaagctaataaaggaaattgatttctctgaagtgccgtgtgtctctttcgctttcctgcatatagcaggacagaattagtggcagcattggctccagtggtctgccaggctagcagtaataggtttcagccacgccttgtttgattgtattttgtctgaagagagggataaaacagctttgagtttgcatgtaagattgcctggttctcaggatcaggaacttcttagagaaaagcattcttaatggaataaaaggaatttaatttattgtttttagtattgtgccctgataaacacttttatgtcctttatatttgccttatgcacataatcatttaataagcaagcatatgtcaacatttattcttttaccaagcatgttttgagtggtggagcatatataatatcagctttttaaaagatgtttagcatagtacctgatacctccatattatgtgcagacatgcggcttttattataataatgattactacaaatatctaataataattgagcagttatgtgccaggctatactctatgaattttacatttgttatcttaagcctcaccacttaacatataagaagtggttgattattgttgccatgattccaatgggaaaattggagcttagaaaggagattggtcatttttagctgcagacaacaaagagttgtctagctgagggtttctcaagcatagcacagttgatgtcgttgggggctgctgtgtacattgcagaatgcttagcacaatccctgccctctactcagtagatgcctgtagcaccctcctagttgtgatagcccaaaatgtctcccaactttgctagatgtttggtggtatgcaggatttttcttggtctctttgccagttggggacctctggctagcgatgtaggaggcttctcttggggcactctacctgccacagggggcgccctgcccagtcagcccacctgggccaagtctggcttgcacactggttcccaagttcttgtcctattcccaagaagaatgaggatgcactgaacattgaagggtgaggaggtcagagaagaatttcattgagcattgaaacagctttcagtggagaggggtcatgcgggtggtccccctaccagaaggcgggaaagtcccccatgtatctgggtctgggaccttttatggactcagaatggggagtgcatgctgagtggtgtgtgagtaagcaaaaaakgttaaagtgaagacaccactcaaaggtgggcatgacaatttagaaaaccaattaggaaagggtagctatatgttaaataggtgaagggtgggttcagtcagaggaaagtgtgccaaatgggaagacaaattctcagtccagtccgaggatttaacttgtagctaggctttcaggctttaaactgtctttggcttggaagtggggttccacctggtacctacccctatcccatcttcctaggcatttggctgcctcctgtggccatcagtgggatgggagtggaggacaaaatcaccagtttgagaaccaattttctagctcatttgagaagaaaaacaaaaatatattataggatttctgctgctgctgcaacctggacatccttcttttaatgatcgttcagaaactgaattcctgtattgcttcctactccttccttgcccttgctgaatgggaacttggaaaagtgaggtctttccttctgtcttggtgagttaggacccataatactggaaacatctccaatactgagcttgtattatgggctgtgtaaagcctggtccctgactttaaaaacttacattcaacaaatccaaaggctattctttcagtgttcctataaaccaagccctgttgcagggctgggaattcaaaagacaggtgtggtcctagttcttttgaagcctatagtctcattagaatcaaatgtaagagcagtgtaatacaagttctatggtggagagaggatcaaagagctatctgtaaaagtcctgtgaatgagcatctgactaggtttatggaagcctacctagaggaagtgacttcaaaccttattttgaagaatgaaggatttttctctaggtcagaaagagggtcttagctactgtcacatcccgagacaactgagtagtacatactcagtgacctgaaataatagattctctgtctctttttgggtttgtttaaactgcacatttttgtttgtttttctaggtaataaatagcctcgaaatttttgtttaaaatctgacattttgaaccttctccattgttcttgttactggtggagtgtgtccaggttcttggcattttgaacaaagaattagacaaaacacacaaagcaaggaaagaatgacgcaaaaaaagtagrgattttttgaaaacgraagtattctcattggttgtggaaagcaaccaatcagaagctaaagtgaatttacaaagttgcacttctgtgcaaaggcakacttggcccacaatcagtctgattggttgtggacagcaaccaagcagatgtactttcaatttcctatctgccacgcagaaaagctgggggtttgcaaagttctgtccttttagagaatcctaatacacgatcccttcactctatgaaggattgctgaaaacactgacaagaggcagatgaatagaagaaaaggcatacaaatttatttgatcataattttacatgacatgggagccttcagaatgatgacccaaagatacaggggaaattgtccaattttgtacttgggctcaacaaagtacagagagccatatagaaatatgattggacaaaaaatgtgatctaatcctggtagactgagaaaacccagcaaggtgtgtctgcattcatctttgcctctcagcagcattccttgcttctgggtatggggcaggacgctttctggaatgggggtctaatgacctataattaagcaagktaggtcagatagtttcttyatggccagttattatgcaggaaggtggtagggattagaataatatttttaggttttgtggctggcctatggggagaaaattagaggctagagagaggagggctggagaaggtccaagagtcttttgtttctgaggccttcattttgggtattatctttctgagccctgacagcagcgatgtgcacatccattcctatttggtgtccctggatagttctcagaaaaggaggttaagcactgcatagttcagggtctgttgaaaggaaatccaagcaccaccagctcctaagataattttaacaaccagtactcttgaagctgcatgaagacaaacctactaattgctttttcctttgcccagctctgttgttaaaattctgctttctcacacaggttatttcaatgctgctttttctgtctttgtctatcccgggcttttacttttaaatgaagtaagtaccacttgaacgcttggactattggcttccattatcttctctgtagactagagtgtattattcatatgctaaagcagagaaccagtcaaaacctttgttttgcaytattggtatctctgtgaaataagaattttgttctgggcatgagcatgactgtacaaaggtggtccttgaaagtaggtaattgttccaagtgctggaatgagagtaggtaaagtctgccaagacagtgggctattaaggcattctttttatttcagtaaatgtggattgagcatctactatgtactgggtactgttcttgaagcaatgactatacagtgactgatattcccaatcctcaagaaactaaaattctattgtgtttcatttttggactatttttagtccaaaatagtccagatgagtgctagtgctactttattacagatggtattgtatttctaaaccaggctttctgctctgaaacttagataatttgcaaacaggtgtctgtcagaaatctggtgcatgttgttgcagtaataggtattaaatgattagagtgaatcacttgtgaaaatgaaggctattttttcctatctcagtcaatatagaaataagcagtttttagaattagtgtactctttaaaggacactatctgccaggtctgagaggagttttaccaaggattataactatacctggagttgataataataaatttcatggcccaaaaagttgggaaaattagtgggggccacagtggaatccaaccagactgttgatgttggaatttacttcatggttggcttctcccacccacgtgctctttggaaaacttgctccctgttttgcaactgactgcatgttattcttagatttagagaggaaaagaaaaactgtgagtgacaagcccagatgtagtttaccttgcttattaatacaatctgatgtgagtgtctatgagattttctttttttctctttaaatccttctttaagtagaatgcaagatgataaagatcaggaggtaggaggagctggcagggatgggggaaacaatagccccttaataagactcttagtaatcaagcatgcwttttgtgtctggagttagggccatggaagtgacagactgaccattttaaaggctgccatcattacagactggcatgtttctaattacgcatgaaatgaaaggcttcagagaagaaatgacccagaacactcaactgttgaggtatctgattaaggcaagtagggcttgtaaggaccaatctgcaagattatgcttgtccaaattgttttcaagactcatttgaaatttactctatttccttttatcttttctgtccaactgcttttgtaccagaatttggaatgttcaaatttgacttatagtcaggggtccaggaggaaacagattgtataatcagatttaatgggaggtattttagtaatgggattacttataaggtatagatagggttaaggaaactacatggggtggggaagcaccggggactaacagtggagggaagctggcatcacctctaaacctagaagggatcatgtgttatcagagccacataagagctgaccttatccaaggggtcacaatgggagttgtgggggtggagggttatagaaccatgacagtgagtcaatacccatcttctcttctctcctggcctccattctgttgcagataattctcactggccgaacctaacagtaagtcagaggatcagtgagtctggcaggtacacaggaaataacttcccaggatgcagatcaggaaggaaagagaatgcatctggtggaaaatgaggaataaccagcacagctgtctttcatgagcatgaaaccactttggagatcacatgtatatggaggtgaaacttggatttcacttcaaagtacakaactaaggaattcactaaaaatcttctgagcaatcactacaagcaaagcaaaaataacctttacaaatgcatagawaatgtctttagtcatggatagatcctttaaatcaggtgctaccaggggctgcagaattgggtgtctccaggggcaggccagccgtatcaatgattaaattgatctaggtggtaggtctgttttgaactgttctctgtaaaggcaccaatttctatgcagcactaaggaatttaagcctaacattttcaggttgtctaatttttttttttaaccaaagaatttggattaagaaaaataaaatgatctcacttttaaatgttggcagctaattcaattttgttttttagagactttgaatttagactaacaaaatcctctcactgagatttcgcactgagatttcacttagagagatttcgtactccctaagttcctcagtcttttcagcttctctaatgatctaagtgcaaatggtgtgatcctgcttaccatggggagaccaactgtctaccccagcactttcagacacgtgtgagtttctgttgtgctcttctgccatctcttgctctggattcctgcttctgtgtgcatgccagcacctctgctcagctcttccccttggtgaccagcagatgtttcttacatatccctacaagccccagtgctctactaacccaaggttggtgtttctaacaccaacattgttagaacattcttttcctggaggtatagagataagagggtaattataggacaaagcaggaatccatttccagtggaaagtctgatgccacgaacttggccaccctcttatatggagctcctcttggagctttttcctctgcaggccccaggctgctgccagggtcctccatcccstgcttcacattacagggcttctttcacctcctctgttctccatgtctccatgatgtgctctccgcttccatttcttaccctgctatagtatctagggacaactcctgaattcctgttctacagattccaactcatgtcacattctgttgcaacctcttctgctctaggcttggctcttaagtaactcaaagaccaactaaagcaatcctacctaaaagagcacttatttcactatccagagtactgccatccccatagagcacccggcttagtcattgctracttacataatgcacctcttgtgtcctcttcctgtaatagaactgactgcctcagactagttcctggaggctgggagcaagaggatactctgaattcagaagcagggtttacttaaaagaaatctcatcctctgtaaagtttggtaataggtggcactatggacagctagcctaactcagccacagaaaaccttttctttttgaaggcatgattttttaaaaaattatgtatcatagctaatgagatagggactagtttcaaggctaaaaggtgattataatcacccacacagctgttgaaaatggtgtcctactttgtatttttgtttattatagtctagagggaagtaaattaccacctcattgtcagccaataatcattttcctagaaaaagtaatttatcctctgaaagagaatattcacctgctcacctttctgattgcttcattgtgtatgtgattgttaaactgcctaccgaccacgaaataggtgtttctatactccagatccaagacaaaagcagtccaaaatagagtgtgagtcagaagacttgagatcagattgcagtcygcttcccaagtcctcccatggcagtcattatgggagacagcaaatgtcacaggcattgatattctcagcatctattcctttgtgctcatcttttgggagaatgagtcttcacacactgtgagaagatactacttcttctatcctgagggttaagaaagggagaaaatgggatatttcttttagaactatgaaggacaaaatcccagtgcaaaaagaaaatgagagaacttctgcagaaaaacccttgaagttaataaagcagatatgatgataagaggaaactttttataggttataaataccttcagatgtactttaagccacttatttagttcttggccagcaaattattgttacagtgaccaaaaagctgatagaaagcacattttattctaaaagagactgattatctggcccaaaaataggttatgttagcatctttcaaaaaagtctattaatcacagtacttgcttttcaatatataataaaatttcattcttatgtatagactttccaccttttattccttatttttaagattacatgtgtatatgcatacataaatgtttttattatttttaaaacattttcttgtaacacatccagagtttgtcagtttttcccaaaacatagattttttttccacctatgtggtatatatattattttcttaactcctatgaaatcaaatagatyccttccaggtaccttattccttccacaaaatttggattattgggtaatatggtaacattaatattttctaacatattaagtgtgtaatttactaagtatcaccctagatttcagacaaacattacaattctgcaaaactgatgaatacagattataaagtattcatactgctttaacagaacaggcttataactgattgtggagggtgggtgtggcattaatacctatgtgactgaccctgtgtatttgttaaatttccaatcaatgttaataaactgtcacacttgataggcaggatcagatttgccctttttgggttacacacacgattattactttctcatctagttagtttcttgctggctgaaatttttcttagagcatggacactggcattgtcctttatgagtcttttatttcctctccctttctagcattatacctcaaagattttcaggagagaagttgcagaaactcttgcttaaaataaaagtaggtattattttcaggtttccgataaccacagcttcccattcctcatagctacaggagaaagagagttaatgtactgccagatctatagtagagactttgaaaaatagtgatgcagggttttttgctccttagttcagctaggtccgagttcttgtctcacaaccaggaggaattaggctcgtggacactggagagttagtagagtagaattcattaagtgaaaagaaagctctcagcaaagaggggatgtggggagcggttcccctacccgaaagtgggaaaattctctaatatggctgagsctgtggcttttatgggctcagtaaagggagtgtgtgctgattggtctgtgagtatgcaaaaaaggttaaagcaaagacgctactcaaaggtgggcgtggcagtgtagacaactaattaggaaagggtaggtatatgtaaaataggtgaaaggtgaggatcaatcagaggaaagtgtgccaaacrggaagacaagttctcaatccagtccaagcatttaacctgtagcttggttttcaggctttaaactgttttcagcttggaagtggggttgcactggggacctgcctttatatgcctaggcatttggccgcctcctgtcgctatcagtaggctgatgtggcaccataaaaatgggccactgaggtctcttgttgtgggagcataactggctgaagaactcagctactgctatccttgatccactgctgtctcatggcaagtccaaacttcctatagtcagtgaatgagctgttagcatagactccttccttttacatgtgagactttctcactggaacatgggctcaaggactcctagttggcctgccagacctctcttggaagtaccctggagcctaagactccttcttcccaaacctcctatctcttcctctgcttcacaagcattagcatcatggtctggaagttcttccttcctaccctgctttcctcccccagtaatctcctaggtgtctaatgctgactttgtgtcttttggtcaaagaacctgagctaatgcaaagggcaagctgagctctgcttctaaattaatttaaaagttacccttcttttctacagttgcagtttattctttgaaaacttttgagtagagagaatactaccttcacagtgaagaatttgcttatctgtrtaatacattttctatgtagtttacatcagtggctacagcccaggtagagaaaatgcttgattgcctggtgcattcctatatgtgattttgtggacaatgaaaagcaaagaagtaacagtaataataaagccccttcccacatcctcccaaattaaacttagatatgaggaggataaagtttcctttttatagtgattctttaaatgttctggggaaaaagcaaaaaaaaattctttatatgtatccttgaatttaaactttctattttttcattttgaaataagttattgagatgtaattcacataatagraaattaatcattttaagtgaacaattctgttagatttagtacactgataatgttgtgcagctaccacctttatatagttccaaaacattcccaaagtaaaacctcttacctattaagcagtttctcctcattctcccatccactccagcccatgataagcattaatctgtgttctatctccatgggtttatctattttaggtatttcatataaatggaatcgtacaatatattaactttttgtgtctggtttctttcacttagccactatgatttaatcttctgttcatttcccaatcaaaaatggccttggcaataatgtttgtttcaccctgcacagaagtggttttgtttttcatcgctgtctcattctgaagcacaagaaagattttcctttttgtcactcgctcataaacttatcagaaaacaaggggatttactccttcccctaacgttatatagctgttttctctagatccctatatgtgagtgacggagaacatacacagagtgtgcatcaactatataaagctgcagtagctatcaaaacataatccgttctttattttttgagggagtaaatggaagtttcaaattctaggagacttacccaaatatcaacaagagggccagacagtaggcaccagaggtagactgaactggcgagtgacaatacctgtcacatgggggtagttctgggtagcaagtgcggtatcagccccagctagtgtggtgcctggtaggtagaaggcttggtgtgttagctgttggtgtggtgatctgtgatgtggtgtttgtagccattgttgtggagttgacattatttaccaccaccggacaggtacctctgtagtctgtgtctttttaaggatggaatctaagcactaatcaccttccaagaaaaagttaataaccctgtccaagctggaaaaatggcaattgataattgcaaaattctattgtaaatgaatgtcaaatcagaattctggtatccatttctttggtgatgccmascaaatgaaaccctgccacttgycctgcattcaaactgaaattggaatttgatcttgggaattactttcttgtctagtatttgactgatcaaatgtaactccttcccttttaggcccctttctttcttccttttaaaaacctttctctattcatgaagcacaaattagcctttggaagactctctatctagctcataaactcgttaccttcttcctcagaggcatgactcattcgcttttgtctctcgacttcttagattattccctttccttacatctcacttttcttttactgtggaaagraatatagtaaatgattaagagtgaaggctatggattccactttttaattcataccgcctaaaagctgggtgcctttgaacaaggattttaaactttctaatcctcagtgtctgcatctataaaatggggagataatcatggcttaatgagacagtccatataaaatgctcaggacagctcctagaacatagaaagtgtccaggcagtggtatctaaaaacaatgatcatgatgatatggcttatctgtgttcctcatccccttgccttgcagaaattatcagcttcacaaagcaccaccagctgtcaaatctgcatctagcctgacctttctactcaattctatttctgccgtttcaactacttctgaatagtcccactgcagtcctctgctttcatcttaaatgtgacttctccaaaagccacattctttttgacctttgtccatgttattttattgtatcatctagcttcagattcatgcagtgatctttaaatacttctgwatagctcttttccccacatttctgcagttaccaagtcctatatagtcttccttcacaacttctttgtcatgtatttacttctatttttatggccacggctgcagatgaactctcagccactatccttctggacttaatgcagttttttaagtgatgatgatagtggtaacagtggtagtgatgctgacagcagcacagttaatgttcgtggagaccttactttgtgccaggaactattctaaacatatataatatgtatcaactcacttaattctcacagcagacctttaatgtaggtactagtatttcctccattggagatgaaaaaactgaggctcagagataataagtaaccttcagaagaccatggtgcatatactcagttcaggatgtgaacccaggcaggtacctgtgtccttaaccatggctctccactgccgcttcatcctttccccttctgtgccaaagcattcttcctgctttcagtcctcttgattttgggcatgttcagtccttttgattttgggcatgttgctcccagattaacataacatttgtaggtactgttttttgatttaaagaatggaaagtaaggagaggcagggcatgctgcctaagctttaagtgggcatttagcttacctgaaattgcatagagagtgggttgatctgtttctcaatagaaagttaagaactgtaatttagagaatgtctcagaaactccttggattagccctcaaggctctcctcagtctctcttcaatgaattttctgaagtttttcacctgctattcccattcctacacctctgacccagtcaaaccagtacattcagtgttttactctatcttacacatccttcccccataccctgaccctcacccctgaggctttgcttacaccataagcctatcctgagagactcttcttttcccctcctactcattttctttcccgtccattctccagagtttgctcttggtccagctttctttagacatcttcctggatcaatccaagctgggaacaaaagaactctcttgcagttattactgaacgcagagcagggtggcaaatgcagaggcccacaggagccagacagagaacttactggagtgaagagaatccaagcctggcataggtggcattattatttagtaccatgcaatcgttgccatgtggggataagagttcatggttgccagaggcctcattttttccatgaggtaatggaaatccagatatttakatgtaagatcttgaatttttaaagttgacaatttatttaaataaaaaaaacgtaggaagaaataaaatatgatggagagcagccaccagttttgacttctgctatggagtgtgttgtccacattcttcaatggaaggactccacagtgtgtgaggaaggatcttttatttggtcagcttttcctaagccacttagaaaaaattggtcctcacttatttcctttgtagaagtgtatatatgtaaaaattacatgcaaatttatatataattatatacataagttatatgtaaaattatatattatatatgtaacattataaataattttacaaaaatatatatattttttcaattagtgcacaaagtttgaggatagtacaagaggacttcaaaaagtttgtggaaaatagaattgaaagataaattttttctcaaaaaaaatctttatttcctcaacataaactccatgaagtttaagatgcttttgtaagcaataataccagccatttagtccatccctaaagaattgggggtcaatgcaatcttgattacattattaactgaagaaaaatgagtgccctttacagactttttaaaattaggaaatgaaaaaagtcagaaggggccaaatcgggactgtaaagtggatatctaatgattttccatcaaaactctcacaaaattgtcctcatttaatgagaagaatgaacaggagcattgtcatggtggagaggtgctttctgatgaagcttccctagctgtttctccgctaaagcttcagccacctttcccgaaagactctcataataagatgttatcattctttggccctccagaaagtcaacaagcaaaatgtcttgagcataccaaaaaactgtttccatgacttttacttgtgaccagtccacctttggttttactgggccccacccatttccacctcttggtagccactgctataattatgctttatcttcaggatcatgcgggtaaaaccaggttccatctcctgttataattcttctgaggaatgcttcaggacattaatctcacttggttaaaatttcagtagaaagctcttgtctgcagctgatctgtgtgcaacagttttggcacccactgagtggaaagtatgttcagctttagtttttcagtcagaatggtgcaagatgaaccagttgagatgtctacgatgttgcctgtttctgctgttaatcatcagtccttcttcctcttcagttaaagcatgaacaaggtgaattttttccttggaaattgatgttgatggtctgccactgtaggcttcatattcgacatggtgtcatttattcttataatgaattatccatttgtaaattgctggtttattttgggcattgcccccataagcttcttgtaaagcatcagcgactttaccattcttccatccaagcttcgccataaatttgatgcatgttcttgcctcaacattagcagaattcatgttattcatgttgctctgatacgggatcttttcaaactgatgtcttaatcttcttagtgcctcaaactagatcctactcagacatgttacaacaagttagtatgaatttattttgatggaagaaaagtttgaaatctatgcataggattttggaacatatattttgatgaacttattgaagcctctgcataatgtgataaatattaagtaatctctgtattgagttgatcataaatgatatcttgtttcagcaccacctttttgtcccaaagagtaatcagaattaaaaaaaraaaaaaagaagaaagaaacattaaggaaaggcaccagccaagagttaattagcatttggctcaagacacattttaatacatataataatgcattatcaggcagcccctcaatatccagatttttatgaatasagtcatccatcgcttgatgaaggggatatattgtgctaagtgtgtccttaggtgatttcatcattgtatgaacatcatagttacttacacaaatctagatgggtgtaacctactgcacatgtaggctatacatacctgcacagcatgttattgtactgaatattatatgcagctgtaacacaatggtaagtatttgtgtatctaaacgtagaaaaggtacagttaaaatacagtatragaagtaaaaaatggtagacctgtacagggcacttaccatggatggagcttagactggaagttgctcaggatgagtcagtacataagtgatgagtgcatgtgaagggctaagatattactgtatgcytctgtagactttataaacatgatacacttaggctatgctaaatttgtttaaaaacattgatgaagaaggaggattgcttgaggctgggagcttaagaccagcctgggcttgcagggcaagaccttgtctctaaaaaakaaaataaataaacaaaaataaattttaaacatatttttctttcttcaataatctcagcttattatagcttgttcttttttgtttttgtttgcttgtttgtttgtttgttttttgttttgttttgtcagacggtctcactctgtcgcccaggctggagtgcagtggtgtgatctcagctcactgcaacctcttcctcctgggttcaagcaattctcgtccttcagcctcatgagaagctgggaccacaggcatgtcccaccacacctggctaatttttatatttgtagtacacacatacacacaaggtttcaccatgttggccaggctggtctcaaactcctggcctcaagtgatcctcccgattcagcctcccaaattgctgggattacaggcatgagccactgtgcccagcttattgtagcttttttactttataaacttaaattttttttttagctttctgacactcttgtaataacatttagcttaaaacacattgtacagctatgtacaaatattttctatctttatatctttagtgtatttttttatttttaaatattagattttgttttttttctttttaaagttttttgttatagactaagacacaaacacacacattagcctaggcgtgcgccaggtcaggatcatcaatatcactgtcttccacctccacatcttgtcccactggaaggtctttagggacagtaacaggcatggaactgtcatcttctgtgataacaacgccttcttctggagcaactcctgaaggacttgcctgaggccgttttacatttttatttctcttttataaatagaagaagtagactctaaaataatcattaaaagtaccttgtaataaatactagagggtacggtttgtttttttttttttttttttttttagctccattacaatcttaagggaccactgtcatctatgtaatctgtcattattgaaatgttatacagtacatgactattgttagagttctctagggaaaattggactaaaaatttttcatctttttaatattaaaaatccaaatttgaaatcaagctttaaaaattgttatccatatactgatacccatatattgttactcagataaacaaattattttcatttgacaaatttaaaacaagtgaataaaatttgaggttgatagcttgcaattacattgattttcattttctttctttggtattattcaaagtgacaatgcttagataaatgtcacttcatcaacaacagttttgcaacagagagattgcagcagagagatatatggaaggaatgtgtgaaaagcgttttcagaggagcagatgaaaggctttgcaaactattggggtggtcagccgtcacacttgcctctaagtccccatgaacttgtgtagtgcttgacttcagtaagagggaaaaatgtggaggtggacagtggtttatatrtgatgcaggaaagatacaaggagatgacagttagtcaaacacaaaatgttctgacaggtgtatagtagactcaagaataaataatraaatgacagtgattaaaatgtgtttacttaagtgaacaatggcttgaaatatggctacacggtaaagacctcattatcgaccatacttggcacataaatataacacttatgttgaggggtaattaatttgctcttacaggtgaagtgatgggtcacttgtggcccagcctcacttctttgcaytggacaagttaaatcctgaaacagacattctctgatagcatttaaaaatcttccaagccagacactcattttagaagctgttaggtagttgtaatttggagtgtataagcagaaagcctacgtgtgaggacagatgacagagtgaggaactgtagacagaatgtgcccttgggtgttactgaagcaagatgccttactgcacattttctatcttctatttctgaaagttagtgttcaaaggcaccgttacctaaaacttgccataaatatcatgcagggtagtaagcctcacacttcagcatgcatcagaattacctggagggcttatgaaatcacaggcaggtaggcccttgctccagagtttctaacataacaagtctgggataaagcctgagaatacacatttctaagacactcccaagtggtgcagagggaccatattttgtgaaccacttatatggaaaaccaatcagggaatgcaaatgcattgctaaattgagtgcctttaataaggaagatgccattccagtacattagcaactagggtaattctcaggaacttacagccagacgacaccaggatgactaaaagtaggcagggtggtgctggagggacagacaggctgtgtgttctaagaatgtgggctctaggaatggatgtctgagtagcaacctgccttctccactgtgctaactttacgagccctctgtaccacagcctccttgtctgttagatacagatgacagtagtccctagccctggagttgttgaggcaattccatgagatgctgcatggaaacttggaacacaagagctggcatgtgcagagagctgtgtgattacttgaagacatcagtaacacacaaagaggaaagtaagtagcaatgtatgaatgcatatatatgtgagagatttgaaaatattttctgtcttctcagatctggatatcaggtttaggtcttgtgtggtggtttcgttttgtttggagattgggtctctatcacccaggctggagtgtagtggcatgatcgctgctcattgcaacctccacctcctgggcttatgatcctgtcacctcagtctcctgagtagctgggtctacaggcatgtgaccaccaggccctgctaattgttgtattttttctgtagagatggggtttttccatgttgcccagacaggtctcgtactcctggactcaagcagtctgcctgcctcagcttcccaaagtgctgggattatgggcatgagccaccatgcctggctagggtttgttaactcaagagacgtgccttgtgcagaaggctatctgaagtacatttgaggtgagttattcatcatatcaataccatttgtgtgcttatttagggggttaattttatctcagatgtggttagaaattgtcttagtccatttgtgtgctgtaaaagaatacctgagactaggtaatttataagaaaggggtttattcggctcattgttctgcaagctgtacaagaagcatagcaacaatatctgcttctggtagggcctcagraagcttctgctcatggcaggaggggaaggagaactggtatgtgcagatcacatggcaagacagagaagggtgggaggtgtcaggctccttttaaccaccagttctgaaggaactaagagggagggctcactcctttgagaatagcaccaaaccatctctgtgggatccgcccctgggacccaaacacctgtcatcgagccttaactccaacattagggatcagatttcaacatgagactcagcaaggccaaacaaaccataagcaaactatagccaaaatatttcagatgtgattgtggaagataagtatggtgtgtttgagggtatagtcgcttcaaaggcctgtggtgacaataatggtgtgagagggacagagagagaagtcaagagagtggagaaacagacagactgagacayagggttggagaagaaggggtagagcagaggcagaaaggtgaggggggagagaattgggaattcaggatgatgattattgtttccaaatgcttttgacttgtgttaaatccagccattcttagaattcgagtaatcccacctgtacatgtccacttagaccgcaaccaccaaggagcctgttagatgctaggcactgtcctctcacatttattttgatcagttcgggaagttttaagtgtccattccttaggaagtataatagaaacagaggtgaacaaagcatggtccctgcctgcagggagaatgcagattagtgtgggagacattaaagaataagttggctgggcacggtggctcacacctgtaatcccagcactttgggaggccaaggtgggtggatcacttgaggtcgggagttccagaccagcctagctgacattgtgaaaccctgtctctaactaaaaatacaaaaaaattagctaggtgtggtgrcaggcacctgtaatcccagctactcaggaggctgaggcaggagaatcgcttgaacctgggaagtagaggttgcagtgagctgagatagcgctgttgcactccaaaaaaaaaaaagaataaatagaatttccttaggcaaaggcagagaaagagaaatattaccaagtggggactttcaagagcagaccagattagaatcccagctttaaccctaacaggctatggaattgtggaccaccagttgcttgtccactctgagccctcattgtgtttacgctatagtggacatagttctgtttaaaggtcagttgatgcatgtaaagtggtcagcacctaccacatatcgtctggaacgcacacacagtaggcccttcacaaatgagagtgtaggttggtttctttgttaggtactgctcttttgcaggtagagtactgagattagactagtgattttgacccatgtgtgctatgattatagtagtgyatacaacagaagaaattgtttagagaagaggcaagaagtggagtgtgaggtcatgccagcatgaagaaagattgctgtttaccagaagatgctcaaaccttgtcctctgggtatatatgagagcagtcagggtagtcagcggtttctattgaaacaatgacaagagtacaggaagaggaacaagtggatggtgcaataaccatggatgtttttatagatattgtgaggtgaagctgcacttcratagtcattgccttgtcattattgttgaattgtttcatgttgttctaagtccttgaatccctcaaatgtgctgccggaaaggtaattcctcaaaaaatgtgcagctcrcagwtggtggttgcggctcataggatctctggcttaagaccctcgctgtacagtggtagtcagtgggtgggmggaggggtgacaagaaggcagggaaggagagagtcttccagaggcagaagagaccagtgagtagcgtctatggaaccacactgccggggctcaaatcttgaaatcttggttctgccacatggttgctctgcagctctggccaagttacttacttgccttatgcttcaatttcctctaatgtaacccatggatcagttaccctgggtatggcactcagaagcacctgctacatagtcagctctaaagagttcgttatttctattatttcacctaggaaagatattcccaacttttgacatcgattccccagggtagggttaatctcttagagtaatactctaaaatcttatatggaccaggcacagtggctcacayatgtcattccagcatttggggaggctgaggcaggaggatccattgagttcaggagttcaagaccagtctaggcaatgtagtaagacaccatctctaccagaaaaaaaaattcactgggtatggcggtgcatgcctttattcccagctactcaggtagatgaggcaggaggatcctttgagcctgggagatcaaggctgcagtaggccatgatcgtgcaactgcactctagactggatgacaaagtgagatcctgtttcagttacaaaaattgtattatataaatatttaactcagaattatagtatacatactctaaggataactaacttatataaaatgatttataagattgttcaaagttgctatttcctttttcttaattattttattcagcacctttatgtctagtttgtagtaataagtactataaaactaagttttcacaaaggctgcttttgatttcctgcacctgatgtatatttgtacacttaacagttgtatacacaaagccatgtatactgcattttgtgggtgatttaaggcatttttaaaagttatygagtacttgagagcttaatccacagtggatgcttctccaccatagcccattagctggtggtcataacatttactgctgccttgtaytttttaatctgctggaatagacattattatttccattgcatcttaagttgttgaatcaagtagaattcagagtgggacaccaggaatgggagaggttatggttatatagcaaatgctatattgtatgcatttttttcctcttaattgtttaacaaaagtctgttgtgttagcaacgtatctcttcatttttccttgccataatatattttttctgcttagraggccatgcctattactgtgcagttagaacaaaatgaacatattttaaaactgtatagagcgaaagaaagggaaggcattgaacrtaaatttagacttctcacaataggtttttatataaatgatttctgagatttttttttttttttttttactaatgtgaaaatacctcctagctctgttcatctctcacatagtgtttctgataaagttttgtagtgtatctgttgaagagatactatgattcaaagtgctgggtttttgttgttgttgttgttgttttaagattttgtaatgattttctgtagtgattcacaatggggttggcccttggcagtttttatgtgagtgaaagcctgccttatccttgcacgttttgtttatgtccatgactgaccagtttcgtggtaataaagcgacaaagcaagaatgactaataaactatcaggggytaactactgtgcttgcttttcctttcctggagtgtgtgtgagagaaagaaaaacatacgactctctcctcgcatggggctaaagataccaaacctttaaagtgtataactggattatctcaaaggcaaagaacatcattaataattaggctgccacttaattctactttatatcatcatctctgttgtgaaacttaagatattatggaagttattattagattagtartagtctctattaaaaattatctccaatttttttttttttttttaagacggagtcttggtctgtcaccaggctggagtgcagtggtgtgatctcagctcaccacaacctttgcctcccgggttcaagtgattcccctgcctcagcctcccaagtagctgggattataggcacgcagcaccacactcgtctaattttttgtattttagtagcgacggggtttcaccatgatggccaagatggtcttgatctcctgacctcgtgatccacccacctcggcctcccaaagtgctgggattacaggcatgggccacctgcgcctgtcctatctccaaaaatttaagctgatttttgacataaacattttccagaagtgatttagcactgtaaagatggtcatgtttttgcttttttgcaattaatatgtcttttttgacagtgagaacttgacccaacagtatttaaaggttgatgatgggttaaaaattttgctgttgtttagagagacaggatgaataaggatgaaacaaataacaaaatagcctctgttgaaaaatgctatttttatagtagatgtacctcctaactctctaaatggtcacatggacttggttaagcttgacatctgtgaaagacaaaatgatttttttttttcagtagctcatgtccatagaagtcctggaataatcatttaaatgatagtgatcatatgtagctttagggcatggttttttcaccttggcgttgttgacattttgggtgggataattctttgttgcaggaagttttccagtgcattgaagtatatttagcagaatccctgttctgtacccactagatgccagtagcactctcacctccaattatgagaaccaaaaatatcagtagacattgccaaatatttctgggtgggggttgggggagcaaaattgacccttggttaataacccctagcgatttggaaatacctaattaaagtttccagtgattttaaaaaatattgttattatcgtaatcataagtggcaaattattaaggccattataaaatgagatctcacccagtggtcacagatgaaataaaccagcttattttgacctcattacagctttaggaagtcactggcaagtaagcgcaaaagaaactcccattccctacatatttttctatcggtaaacatttctgtcgctctgttttcaatgccaattcattttagtaatgtaactcagatggtttagagttacagtagataatggctaatctgcctactaagtagagtttgttttttcctagtgaatgaaaatgcaaaagtattaatacagatgcttgtgtgctgctgaatttgatttgacaagctagtcgtgacattaccaagaggtctgtggaaggtaaaggtgttgaagcatgaagtggaagcagtgtttggggaaaaagattgctaatgatagaggtctgatttctcgttctctatgtaattccaaatgcatgctgtgcttgtcatttagaaattcagactagaccagatgctgcatttgatatgttgtatacagttctttttagttaatgaaagccctattggagtcacagtatccaaaaaacaattcctaagtgggggtaaaaaaacctctgattagattattgggttctatcagggaataatatggactcaagaatggagctttatcagtggcatagttgtttacttgacaagaatcaacagtgattttcagagtatcaggttcacatgtaggtaaaatggacatttaaaaaaattatcggtgttacttgtattaccaattcatacaagttttctggtttaatgaataagaagatgaattgtctcagattagacccagattgtgattacggatcgtattcaggactttatttaactctgtatgcctgaagaaaaacacttcgctcatggcttattttgaaatggcacgtggaaagacacgtgtaatttatgagatgtggcactcttgttgcatttttagtattttgtagttttatactgctgctaatgcaagttcttatgagccatgtttggtgtatgtgggcaccactccgcaattctatgtccgcaagagatgtctattccaaacactgtactttttttctactccaggatgccaattaaaattaagtaggtgtacatgtgaggcacaatccattggctggtcttgatttaaaccctggtcaaggtggtaagttagaaaatgttactctaggctagccactgtccaatggaaccatatttgtgctagtatagtagctattaagccatatgtggctactgaacacttgaaatgtggctaaggaatggaatttttaatttatttaattttaatgtaaatacctacttgtagttaccacctaccatattggacagcacagcactaggcctttgagacacattttctgagacacatgtttggrtttgggattgtttactgtgggtgttctgaacacgccatacccagagttacagagttacagagccattatcatcacactattaagcctctagtctatccatgtagaggataggagaaaaaaaacaaaaaaggaaagaaagagtaatgattgtatataccagttgatactagaaagttaaagtaggaaagcctgatttacagaagcttaatatcaaacatagtcatctctactatcgaaagagagattggcagtcaatgcagatatatacttttaaatatgttctctttcctgttctttgaaatattatctgagcaatagaacagctttatatgtgcttttttttgttgttttatgtctaatgatcttttcttttcttttcttttctttttttttttgagatggagttttgctcttgttgcccaggctggagtgcaatggcacggtctcggctcattgcaatctccacytcccaggttcaagcaattctcctgccttagccccccatgtagctgggattacaggtgcccaccaccatgcccagctaacttttgtatttttagtagagatagggtttcaacatgctggcgaggctggtctcaaactcctgacctcaggtgatctgcccacctcagcctcccaaagtgctgggattacaggtgtgagccaccgtgcccagcctgttttgtttgtatgttccctcctaagcaatatacttctgctaaattggggaggcatctttggggctaatcgcgggaatacaatatatgggtaatataaaatcatttatatgtgacatgaagcaccaagctcttattcatgaactttttggttatgttaaaaatcatggagtttcaaaggctacaaggtcttggtcatatcagtaagtactaggaacactgtgtggcttttttgttacgcggttgccatgatgttcgcatagtggaaccaggcagccactcaagaagatgtactattactgggatttataaatgcttgtaaagcctctagtcatgttgagaccaagatatcagacagctattcactggtagaataacctatgatggataaaatggtctaagaaatattcatctttgccttaccgggtcaaaatgctcaggggtgttagaaactggtaatgataataatcratatttggcttgcatttttaatataggtctgaaaagatggaaaatactcatgcagtgagacaactaaacttggacgtgtacggagacatgtagatattcacagcagtactcattttaatccattgcttttaaaatctgtaccctctttttcccataaggttgtacaaccttcagaagttactgtgagtctcagtatcctcgctgtaaaatgaaaataacgacactgactgtgttagaccaattatgttgctataaaggaatatctgaaactaggtaatwtataatgaaaagaggtttgtttggttcatggttctgcagggtgtacaagcatggcaccaacatctgttcagcttctgcagaggccagaggaaacttagtatcatggcagaaggcaaaaggggagctgggagatcccatggcaagaggcagtgagagtgacaagggacaagcttctttaaacagccakcctcttgtgtgaactaacagtgagaacccactcattaccatggggaggkctccaagctattcattacagatctacccccatgacctaaaacctcctaccaggccccacctccaactttggggatcacattttaatatgaaatttgaaagggacaaacatccaaactatatcagcacttacctttwaggattgctgtgaggcttaagtgagataataaatgtaaagtttctagaatagtgaatggatcacataacctcctgtctaaattttagctattattattratgctgttgtttttgaataccttaaaggttatatgttaaacaaaattgtaaattgaaacacagaagccctagagatactactggtcaaagaatatttaggtaggtgttttgttttttcttcaacctaggtattcttttgcaacgcacatcagtctccctcaatttcatttattttgtaaattaagagtttcctataccaggtgttctgaaaactaggtatctccttttttcmaaaatggatctctaaaacttamcagatggtttattgtgacaataaataggagtatctattaagatgttgtctgattatacaaaactgtgccctaatggcttaacaatacttaaggtaattttcattttggtaatgacctgctctgaataccgaaataaatggcataccaaacttgttcctgttgaaccaacagtactcaatgttccagttatggaaagaaaactatctctaacttcttaaacagaagtgttagtgttactaaaatatagttcccaggaaaaatcatgtaacrtattttcatatttaattaatgtttcagattatctacattaagtatctaagtattaggattaactagataattatgtcagtcatcactgactgaaagcaatattttgggggaggtttggttaatttgacctatttcatctaggaagttggattctgattgtgggaattatctgggaagaatgcttctctttttggatggaaggatrtatttaaatttagaatgaaatctatttcatatggcctcagggtgccttgcattaatgcagaaattgatattatgataaaatcttgaacaattagggctaagtatctaaaacccarttaacctttagcggttctcctcatagtagtaaygtgctctcattttcactggtctgggataaaattgattcttcatcattgtgcaaccaaagrcaaaagtcagagtctacaaaaccagttttagacagggcacatgagcaattcttcaaggactggggatgtgtaccacctacttgattgtagtgcktgcaacgggctatattctcctccttgttagtgctttattttttttgaatccacgtttgatcttttttcamcttactttatgataatgaaatgaacctcctaggcttggcctttgggcccaggtacatgtaggagtaatcactgtgaactctgcatccctggcatggccagtgtgtctgaaggtcaggcattgctaacaagattcaaagacatttttcattttttagaaaacaaaaaagcaaaatgtcacacccatcttgaaattaccatagtagcaaaataattttatcatattagtttgacatgttaaatctgtgtaggttgttctgtacttttgaaagatacttcctttccttaaattattgctaaatgataataggacttggcacattatctttgaaataccaaggaattggtatttcaacctccaaatgattaatttaaatgtctctagatctactctgagaagaaaaatgaaagtgccacatgtaccctgatggtcttggtttgtaagctctatctgcaaggcagagtgcctcctgaraaaccaggaacatacctgaagaaaatttaggcaaacgttacaattgttggcttttctgtcactcttcataatcagcctgtttgtgtrgaaactatgggcgtttttaagaatagtctcgggaggctgaggcgggcggatcacgaggtcaggagatcgagrtcatcctgtgaatggtgaaaccccgtctctactaaaaatacaaaaaattagccgggcatagtggcrggcgtctgtagtcccagctactcgggaggctgaggcgggaaaatggcgtgaacccaggaggtggagctcgcagtgagccgtgatcgcgccactgcactccagcctgggagacagggtgagactctgtctcaaaaaacaaacaaacaaacaaacaaaataatagtctctcacattgcttcatgtgtttcagaacattacaaaatgagctttcgtctaacatatttaaaccattcattaattgtcctaatcattagtccatgaatttatgcaacacatatgtactgttcagttttcctttgtgccccctccctaaaccctgtgtcctcaatcagatgcatttcaggattaaaaagaaaggctctcactaggatattttcttaagaattcttggctgggccgggcgcggtggctcacgcctgtaatcccagcactttgggaggccgaggcgggtggatcacgaggtcaggagatcgagaccatcctggctaacaaggtgaaaccccgtctctactaaaaatacaaaaaattagccgggcgcggtggcgggcgcctgtagtcccagctactcgggaggctgaggcaggagaatggcgtgaacccgggaagcggagcttgcagtgagccgagattgcgccactgcagtccgcagtccggcctgggcgacagagcaagactccgtctcaaaaaaaaaaaaaaaaaaaaaaaagaattcttggctgggcatggtggatcaggcctgtaatcccagcactttgggaggctgaggcgggaggatcacaaggtcaagagattgagaccatcctggccaatatggtgaaaccccgtctctactaaaacaaaaattagctgggcgtgttggtgcgtgcctgtagtcccagctattcaggaggctgaggcatcgccgagatcgcaccactgcactccggcctgggacagagcaaaactccattaaaaaaaaaaaaaaaagcttaatggctttctctgttgcatgtaaacagaactgttttcatataaatggctcctccaaggatgaactctatgcctctcctgaacacagctttctttaggggcttatatttcagtcacctgtgtattttttcaactttcctagcatactgtgagtttcatgatgaaagatattattttagtaaagtaagaaaggataaacattacatatggagagagagataaatggatggatgaacaaatcagccaaacaatgacaaactaactgtatttcccactgaattataaccagtgttctctggaattcgtagctttatacacactgtccacttctctatgccaccatttccaatgggggtattaaaaatatctrtgtcgtgtatggtattattttaataaatgtttatttcattttcaaagatggcagagaataacattatagagcatttgtccctggaaaaggtaatacgttttaaaggatttttttaaaaattagctaccaaaatctaaagataaaatgtgtcatttaaaccaggaaaggacagcttctttgtgtcaactttttcatacatcctgagctaaattgtgagtttgttttgcattgaaatttttcttttgcagagaagtgwcatcattttcacaaccacaacagattttagagcaaaatagaagactcttttgctgaaggcagctgtgttttgagaatgtgtgtgtgtatgtatgtttgtgtttatgaaaartctgtggcaaccacattttaccactgatttttataatttctggtggcattttctggacttttccagaaagttcacaccttgtaaacagtattccagtcttctaacatgaacctttggtattcacttaaccaacttattaatatctgatattatatgtttaagataattaaaagctttatttaaatggtaagtcagcagctctttgaatagacactatgtgtcaagcatgggggcttgtggtgtcaagcatgggcttttgtgggatcaagacagacctagttactctacttaaaatctcaataatttagtgggaaagatggacattaaacaaataattttaaacactatgtaactgcaaatatgccaagtcctacaaggggacacacagaatatgaatgaaatagaagaacaggagctgtcttcttctgcttctgcatggaaaccactaaccacgtgtagctatttaaatttaatttaaatttgaattaattaaaaaggaataaaattaaatgttcacttcctcaggcacactaccatatttcaggtgctcagtggtcacatgtggctcatgactaccatattgggcaacacacatctggaacatttttatcgttgtagagagctctgtttgacagcattgcatctataggatctgggaaggtctttctacagaacagttgattaagcctagatatgatatctgagcaggcactgacccagtgaaaatttgtgattgaggggagaatagtccaggcagaagacagctccagaatatgaaagtaactacaactaaccagttgtcttcacagaatggtattgctactcctctatgtatgtgtactttaaaatggtatagtagtatttatactttcaatatatattttttgagacagagtctcactcaccgtgtcacccaggctggagtgcagtggcrtgatctctgctcactgcaacctctgcctcttgggttcaagagattcttgtgcctcagcctcctgaatagctggggttactggtgtacaccaccacatctggctaatttttttttttttttttaaagtagagatggggtttttccttgttgcccagggtagtctcgaactcctgaactcaggtgatcctcccacctcagccttccaaagtgctaggattacaggtgtgagccaccacacccaggctatactttcaatattgatgtaatgatacaaaaccaagttctactgggtttctacttaaggatgttacattaagatgttcctatacagaatcatgaatctggcactcacaattattgaaaagcatttaaaaattgctaccgtgaaagtgttttttttgkttttkgtttttgtttttttttttcaaaaggagcaaaaggaatgattcttgaagagcataaagtattttaccatttttctctccctcttctcattatcatacaccactgctacccttagagtctctcctttcaggctccaaatattgcagaaaccttccctgactcaactctttatcatgtgcattaacttggcctgtttcttattcttaatttattttgtaatatcctgttaactgactgtagagcagcaaagaaaactgcaagggctggttcagtgattagcagtctcttctacttaatagactttttaaaaaacacacagccacacaactattatcacgtctcaacgttgagaaaatattctaaatgttggtggaaaaattgagtatgcaatttgatcttgacttcgggctgcacaggttttaaaatcaaattattacttgaatatgcatattctctagctccacgcttgaagtccttctacataaatgtcaatgctttgcctaagaggccgtgttgtaggtaatctagtatgtgtgtgtgcttctttcttcattttcttagcatataaaaaatctggggtggaagatcctactagtcatgcctttagtctccaaagtttgttgttataattcacattaacgtgttttttttccaagtgatatgcttccctaaatgtaaagcttttagtcctgtttaatgatgcagagtagaattgagtaaaaacttacagaattgcattagcagcggaggaaattaattctggatcaccctaagtcatcaaatattgtttaaaaaaatagagacttcttactttaggttgcaaaaagtaactaaaactagactattttgcctggcacacattctcagtgggtcttttaaaatgatcaggaaagaattgtttataattaaactattaattctcctttagttaggttcctaaaagacttgagattgatagaaatatttcttggcttaattcttctgttttaagcatctgacaaggtcaaatgtcatatatgtgttatatgtaagaaaaataattcagagaaatgaggatattccagtgtcatgtaaatttcaagaggaaccaaaaccattacttttttaaaaagatacatgtagtaattgcaataaccagattcaccacatactagagattccgccttctgtgtagcttgttttaattgacttttctctacttcctgaaccaccagraccaagtgcctaggctaaaacctccttattggcttttctgctaccagtctttctgcctttaatcttttcttccatggctactagagctgtttgaaccagaagtttgaaataggaataggagcgatttaagaatggcattctggttagatagacgttgtaagccgaggggcttctaatgaagttgcaccttgcattcctcaattgtatgttttttaggggtgcttttgccagtagtgactggacattttggggacaattgctggtctccctactaccaccaagatgagtctgctttctccactgagctagggagacggcttatacwctcaacctgatcatgtccatttcctgctttaaaaacctttcwtggcttcccattgtttttaacagaaagttctgatrtcctaagatggcctctgagctcctatgatggtggctctgcttattctctgcctagtctcacactatcgtgccttgctctctgtactgcaaccacactgacctgctctcatctcaaatgtggcaaccttcgcatttgatgctgtttcatttatctagaactttaccaagccattttcaaattctttatatcttagcttcaacgtcactttctcaggtcatccttctctgaccctatccttacccagcctccccacccaaggactgggctgtatcagccctatcatctctcccatgacatttatcacaattacaatcagatcatggcacacacaaatacagaattaatgtgtgccttctctgctaaactagaggctgttgaaggcaaggtagggtctcagtgttaacatcagtatgtccatcacccaatattgtctggcacataaaaacatttaatatttgttgaataaataaataaatttcatatgattttaatccaattattttgacatttttatttggtaggctctagaacagaaatgagtccttcatttgattatgaacacacyaccagtggattaaattcatctctattaacttaaatctttgtaaccagcctaagtcatttgatttccactctgaatatactgaactcaatatcaaaagaaactttaatttcagaggaagtacactgatcatatcagcctccaaatacattttaaaaaaaaagtctgtgagaaagtaggagccatagataaggaagaaataaaagacatcctaaagcaaattgagaatggaagataaaggaggcagctttttaaaaagaggttaatgcatactgaagtagatgtcactaattttatatatttttgccatcaggaagtaaagagctttcgattgtttgttcattgaagtagatcggcccgaacttgtactcatgactctttttgtcttggaccaataatttaaaatccaagtgtgggcatgtgttggagattcaggaagaaaaagaaaccaggaagataagsggaaaatacaatgagatagagataagcagacagactcatgacattaactctgtttttaaacataatgttctaaatagccaaattatggatgtgccrcaatcagattaaccttccartgatgtcctatagaatgttaataagaatttccaaaggaaagaaaagagggtggtggtgaaggggtggtgctctatgctcaggtaaatttggaaggttggcttaaagatgaatacgtctcttcattttctgacttctcacagaargaggtaggaatattccacatttctcagactttttaggctaggaaacaacattgtcagggcccaagaactgacatctcttccaacactcttgttcagakaccatttgggtaaaagtacatgatgcatttaagccmttctggagataccgccacaatgcagtgatgtatgtaatgaaaatgcctctctctgcagcttgtttataagctcaggctttatggtatgaaagaataggaagtgtcactagcaggaccgtgccaatttttacataattgtgaagattctkttgggaaaataaattagaattgtaatgaggtatgtacagaaagctccatttgatttatctgttagataaacattttgagctaaaaaaaaaaaaaaaaccccacaaaaatctgctaaaatgaggttaacttctcaaataatcaatcattgctctctctctttacttccccaatgtcctgctacctttgcaaatgaccataaaatcaatttatgaatgctcagctatctgggggtattttttaaatgtgctttggaaatagatttgcagttttattatattttctaagttacatcatagagcagaatgataactctaatgttagaagttattgcttttcattccagtaagattgaaaaataaaaagaagagccttgtagtaacctgtaaatatttttagttaaaaaccgactacttgagagccaggttcagtggcatgagcttgtattctcagctacttgggaggcagaggcaggaggatcacttgaacccaggagttcaagtttgccgtgagttatgatgtcgcctgtgaatagccactgcactccagcccagaccccatctcttaaaaaaaaaagctagaagaaaatatttaataattaaaatggttgtagcataaaaaagatgaatatttaaggtggtggatatcccaattacatttacactgatttattgcaaatatggtgaagcattgtgctagacacaggagaataaagatatatttgttatgctccctccacatagggaatttacagtctaatagaggacaaatggatcatttcaaatagagtccagtaaaataaacagattggaacaacacagcggtcagaaaaaccagagtcttctgtctcaggtgttcatgtttgatctgagacccaaggatgagcatgtggatggtttgccttgtgcaaacggcttaggttctgaaaccatatgacacgtccaagcaatttcaactggtttggtgtagctgggcaactaggatgtaaattattagagaagcgaattaaaaggcagtgagaggcacaaaagcaatgtgaacttttttctagagatgtgtgggaatacttagtacattttaaaacaggaaactatgttatcaaatgagtattttaagaagagcacttagaagctgtgttgtgaatggataggagggaagagaccagtttgaaggctgtgggaatagagtgagtgatttttaaaaaattgcattagagcagagatggaaacagagggacaaacttcagatataattaaaggaggaagctcttggggcttagtgatgcatcagacagatgaaagggtgaaagagaagaggggtataagtccacctctcggtgactaggtacatagtgcagccagaatgcagattcaggaagaggtacagatttttgcgggaacaagagaaggaattctgttgtggggtttttgaattcaaggtggatatctagatgaatatttaaactcttgaggaggcgygaccttgaaatgttgacacgggcatctttagtgaattgacactagtgaaagccctgggaggagataattttattgggcgagaggttctggagtatgaatagaaaaacactccgaacagttaatttctaagatagctgaaagtgtattgaaaaggaaacctgtttttatgtcagctcttacacttgatttctttgcttgacctcaagttctaactgaattgggcttcakaaaacataaagttattttgaatcttggccaaaaatattgttaattcaagtgtatatctataaacttaacacaggtgacgtaagtttttctagcagctcttccttttacatattatgartaaaatggcaccaggtgtgaggaattgagattcaaagctctcggacataggcagcgaatcatgtactcctatagcggatacttttgtctattaggataatacagatatgttacaaatatctttttttatgtaccttaaaattattgccaacatagttaatcatgactgtttttctctttggcttaaaagattttctgtaaaatactgttgaacttgtctttgtattggtttaatgagggttccttgtgtgccattggccagtggctaggctgtatattcacagagtgggactctgtaagacacagtagagggtgccttctgcagaactgaatgcttaacagaggcactgaaggtcacacaatgctgagagatattggagtcctgtcgcagccagtgtagaaggtcttgcttaacagcctagaagctcagttggggctatagaaggagacmtacyttaggagaatcacaatctaaaatgaagaataaaaccaaataggcccactctaacagagtataaaagcaagcgtgaaaggatcaagagaatctgccaataatttaactgccacaaaaatactcaatatgttaagggaagaaaagataatccagacaccttgggatatatcattcataattattatacaagtgaagaagacaactaatgaagaaaacaagcagtcactggaaacagatggaagatgaccaagatattagagttaccatagctataataatattgttaaagaacttaaaggaaaacatggatgctgttcaagaacagatgaagaatcttacctaaaaactgctataaaaatcaaatagaaattctaggatcaaaaagtgccatggctgggtgtggtggctcatgcctctaattccagcactgtgtgaggctgaggtgggaggattgtttgatcctagaattcaagaccagcctgggcaacatggtgagagaccccctctacaaaaaataaaaaaattagcaaggcgtgttggtgcacacctgtgatttgagctactcaggaggctgaggtgggaggattgcttgagcctgggaggctgacactgcagtgagttctgaacatgccactgccctccagcctgggtgacagagtgagcggtctcaggaaaaaaaaacaaagagaaaagaaaagtgccatgattgaaatatactgaatggagttaacagccaactagtctctgcatgctaaaaggtcagtgaactttgagccatatcaatagaaattatctaaacaggaaaaaaaagactaagaaaaagaactattttgagatgtattacacacttaaatataaatgcaaaaactgtagaagttctataacaaattagagaaaaaatatcttacagtctcaggcagagatttcttaaagagcacacaaaaagcactagctataaaagaaaaaataagttaataaattgaacttcattaaaataaaaaccttctgattatcaaaagacccagttgagaaaataaaaaggcaagctacagactggaggaaaatacttgaaatatatatatctgacaaaagacatgtatgcagaacatatgtgtgtgtatatatgtatatatatttctamaatgcttcataataacccaatttaaggcaacataaaaggtgaaatatttcaacagagtgcccaaagaaataaatatatttatatatatgttttttcaaatgccaataagtccattaaaaggtgttcaatatcattatttatcatgaaagtgcacattcaaaacaggaatgagataccactgtagatccacttgaagagctaaaattaaaacatccagtgaataagatgatggaataacagaaatgcataaacatagctagtgggagtatgaaatggtacaatcactttggaaaacagttcctcagtttctttttttttttttttttaaaaagatatgttttatgattttacagttccatttcctggtatttacccctacaaaaggaaagtatgtatccayasaagttttgctacacaaatgttcatagtcactttacttgtaaagattctaaactggaaataatccgatagtccatcaaaagcatagataaaatgttggattttcatttcatggaataaaagatacttcacctataagaagaaaaatttctaatacctgtaagtgcatggtggacttctctaaatagttgaaagaagttcaacaccaaagtgtacatactttatattgatttaaagaacaggcagaacttatttttggtgatagaaatcagaacagcagtttccatgaaagtggtggagcttgactgcaggtgagcactggagaacttcctagagtggtagaaatattcgataacttgattagagctttgtatgtgtgtatacatttgttaaaattcatccactgtaaaacctctataggtcayaccatgtaacttttgctttgttgtttttaaaaattggatattttttaaaaacaagcagttaatgaattaaaatagctaattatgactttgcataataaatcaaggcaaatttgttcataaaggcatcaagtgtttcaaatacatcaaatgtattttgagtaagaacataatctgagagggtttagtttgagattttcccacttcctcgtttttgagtaagagttttcttagactttccaacatctttagaaaggagcaaaattagcaaaaactccygtttaataaaaacagtgcattctctagaaaattcactaaaatgtaataatctttgaattcttttcagaaaataatctagaggtactttgaggagtgttagctatttggtcccagggccttggctcctgattgagaaatagaccctgggataattgaagccattcatttgggtttgaatgkccaggcagcattattacctgacttaattgaaaggaactaatgataaaacattaaaaacactgatcctctgagaattaaaatcaaagggccagcccattatctatgagtatttagtattcttaggggaaggttgagctcattttatagattagttgagtattgatgagtctcattgataatggcctaacacaaaaacctctccttttcttcttcttcactctcctcagagaacaaatataatggggcaaagtagaatctcaagttgaatctatcagatggatattttcacttagcataggtatagcctcaacctatataagttgacaaaatgatttaatgggaaggacatgggattaggaatcagagcctcagctagtcccttagcctttctgactttggtagggttgctgtctataggattgtcttagtccattttctgctgttgtaaaacaataccacagtctgggtaatttataaagaaaagagatttatacagctcatgattctggaagctgcaaagtccaagaccatgatgtcagcatctggtgaggttaatctcatggcaggggagcggacggcagaagggcaagagaatgtgagagaaagcttgcttttataacatagccattcccaacatcactaacatactcccatgataagtggtaacagcattaatccattcatgagggtagagcaccataacctaatcactgttagaggtcccacctcctgtaattaaatttcagtatgaattttggaggggatattcaaaacatagcaagggtcaaatgagatggcatgtgaaaaggggttagcaggctgggcactgtgcctcatgcctataatcccagcactttgggaggccaaggcaggcggatcccttgaggtcaggagtttgagagcagcctggccaacatggtgaaaccctatctctactactcatgaggctgaggcaggagaatcgcttgaacccaggaggcagaggttgcattgagctgagattgcaccactgcactccagcctgggtgacagagtgagactccatctcaaaaaggcggagggactgaacatagcgcctttttccttttaccaaaattcagttctatgcaagaaagtgatttgtaggatttctcgaggactcattttctgaaaacaaaaataaatcatgcaaagcaatacccattactgacaaatatgtacttgccatattattatagtcaggcatatrttttattttgaacaccagttgtttggtcattcaatgaaggcaaaatgatttctaaatactaagtatgcttcaaagaggcattagcatctatgaatgttacatgctgcatggatcaagctgtttgttaatcaggtatattttgttgttacgtattttcatgagaggaagaaaaatgttccataatsaaatcaattgagagctaactaaagttactgaacattcagagtcaaatcatttaaaaacactagaccaggagttgactttctgagaaaccatgtcttaataataaatcttaagamgtaacactgatgttaaatcattgaaaattttcatagaaattttagatattttgatctgaaagagatggcttcctaagttctaagaacagaagtggtctatgactgtgatacatccttctttggaaataactaatgagttatgagaactgaattatgaaggaagaaatatgacttaacagaaaagaaagttgttttaatgagtcattaggctatttaggtaagtatgactcagttactattttaatgtaaatatgtgtggtgttaagatctattttaaaamgtgaattgtgatagaatttaaaactcagtgagtatataatgaactactgaaaaacaactttcctttttcaaaggtttaagcatgtattttttcagtaaatcaagtgattaaagggaacatgtaaccttacattcaaagtatatctggttaacttgccttccctctcctccatatgcatttttacaaagaaataataaatttatgttgaattttgattttccagaaagatcccaattttagtggtcttagtattatatataatatagtattaaatacatatataatatatactgtatatataggtcttagtattatatatataatgttctgtttrtatgtaataatatatgagagagaacagaaccaatagaatatatatatatatattcagatagatacatacatacaaacatatatatgaaattgtttcatgtacttaaggaggccgagaagtctcatgatctattctctgaaagctggataaccaagaaagcctatggtatgatttaatctaattaggcccaaggtccaagaaccaggagtgccagtgtccaaaagcaggagaaggtgaatgtttcagctcaagcagagagagtgaattttcccttcctctacctttttgttctttcagcccttcagttgattaaatgatgcccatccatattaggaaaggatatctgttgtactcagttcaccaattcaaatgctattctcttctggaaacaccctcactgatacacacagaaataatgtttatcagttatctgggcatctcttagctcagtcaaattggcacatagaatgaaccagcatgtacacatatagccttctgtgttgctcaatggaatgcctgtgacattaatttcctgggtagaacagaataaagaatatatgtaacagcaatatattcattcaagccttcagtgatcatttgttttacctactgcataccaggtacagtggtgcatgctgagrttttgccagtctcacatgtatacagtataatgtattgtctaagttgtaggtgcttacagagtatgatagaaaaagcccattattttgcccatggcaaggagggggtcaaaggaggtttgaataaaataactgccttcrtaagttataaaggaggagttagaattttccagcagaaaaagtggtgaagagcatttcacttgaaagcagcatggagtacacagacacagaggtgtagaaaagcatggaatgactggagaacaattattttgttattcctagaccaaaggcattattagaaaggctgtatcagagttccaagagggaccagatggtacattcaaatcagcatatattaaagagtatatttacaatgggactgtttacaaagttgtgggctgggtgcagggaaaccacagatgatgttatagtgactgcatgagttactgggaygagtaacggcagagctgtgaccaccccttgacctagggacaaggggaggtagcagttgtgggaacctcaaaggacagaagtgtggagaagagcctgcctttagaggatggtgaccgtcctttgaggaagctagactgaggtgaccttccaggaaggaccaagaggaataaatatcctgaactgttcttccctccttctcatctcctgcctggagtctatcacacaaactcactgaagccaggggggccaggggggccagggaagcttgttggagttcacrgaggccagactcctggggtacagagcacagtggagcagagtggggagtgatggggacaggagatacacagcgcagaggctttacagtgacaccattaaaattcagtgggctcaagttctagctaccacttattttctagctgtataaccttggaaaartgatgtaaccactccacatctccaggtttactcacctgtaaaacagggatagcggcagtatacaagtcagagttgtgggaataaatgagatccatataaagcaattaatacagtgtctggcatacagtgcttagttatgtgctcaatacattgtagccattacttgaaataaaagaatgataaggtgattagatktgttttgaaaagttaagcagttttccgtgttgctacagagattcacaaagatcaagcaaaattataggtaatttttccttaaaacttcataggcacacacacacgtcacttggagctggggagtgattcagyggggacacaaactgggtagagcaatggtaaggaytgatgtggggttgccgacctggataggagcaccacgaatttagagaagaaaaggagcttgttttctgcacctctttttatttttattttttgatacccaactctttgttgcatactgcctttttcttccctggaaacttttacctgtctctcattcagctcctataatgaacatccacatttgaacttaacagcgtctttccttttcaattgctagatttacccaacatgaagaaattaaaggacatttccaaaaggctggggataccttctgaagttctctgctgcttatggtcattgttatggtgatttaacttctgatttctctgacacgggcctttttgmccctctttttgtttgggatttgtctgccgtttattgaagactcatttgactttttgtatactgtaccctgtttatccctcactataactctataaggaaggcaatctgatccacgttttattgatgaagaaaatgagtcaagggaaagttaataaaattggagttactattgaataggtgaggtgttcagctctgttcacgtaggtgataaaaatacaggacatgtatctcatgtacatgataaaaatgtatctcatgtttctcatgttgatgatttaatttgctgaatgcttaagtggcagacactgtgatgggataaagaggtaactaacacactgtccttatccacaataagcacacagctcatacctagtggtgtcatgcttgctagaaacaaaaagtgtggtgagataaattaatttgttctgaaaatgaaattaaaacaacacattttgttaaccctctccaaaaaaaaatccgaacagaaaagccttcatgtttgataagcttttagcttctaagtattgtatctcaatatcaaccagcagatatataggattactaagtttaaagatctaaaatgtataatgtgaggactggagttaataaaattgtattgtattagggatttttttaaggaagtagactttagctgctcttgtcatacacaagaaataaccatgtgagatgatatgttaatttggttcacttagtaaccatttcactatctatatatattctataacatcatgctataaacttcaaatgcacacaataaaattatttttttttaaatctcagtattaaacactgagatttaagattggtgacacccatggcagaagatgtgtgcacagtttggttgagtgacgatgtgatgctgcacatcttgagytgacttgtgtcacttgatttaagaaaggaaggagaaaactttttttgtaaatgagagctgaagtggaacagacttctggatttgactttctcatgaatggattcccgtgagatatgagatagtacagctcacttccctcaaaaagatttatcctcctttactattgccctttggtgtttgtacgagtcaggagagatatggtaagaacttttatttcaaatggtctaagttctgtgttcactgtcattgaggggtaaaatctgtctctctctctggccagtggggttctgtgtctgaaatattgtattgcttttgttgtcttttgtttgtttgattcttgaatctctacccctttacctacataactgactcagtagttgcccaaagaaacttgtcacctgttgccattgcatcttctatgaagaatccatcctttgtttacttgcttggtcaaaggaggggagtcttgcatcctagctagtcactcatttacacactcactgctgcaagaaatccattcaacctcctctacagttggtgggggtgtcttttacttataaaacacaggrtttttttgtgtaygtgcctttgaaaaagaatagtgcccttttccatttttttgcctgacaaacacctctcctctcttgagatgctgttccaatacagcaccatctctgatctgagattttgtctcgttcaacctataaagcgaatttctagtttcatctcttctttatagcattgtattataatctatctgtttacttctccccactggactttcaaaggcatgacttgctcatttttgcacctccaatacatagcccagtacttggtatttggtggatatccagtaactgtttattggatgaacggatgaatatatcactgagtagtaggaaacagggagccatcaccaggatgtattacaccagtattcgaaatagataagctaagcagtgggaggtatatgaatttgtggggagaaaagtaggaatcacatgggtcggacggaaggctttttcaataattcagacttagatttgggttgtggttgacaaaacagggataaagaggtcaaaatgaatcgtgttggagggatataacttgagcagacatttgttttgaaggtgaagttgaggcagctatcagtcagacattccaagcctgggtcagtggagacatggtggctcgattgataagacaggctgtttgagaagggaagcttgtgagaagatgttgtgaatttggctttggccatattgattttgaattaaagaacaggtttattatgacttggtgaagggaagagaaaagaatttgcatgcctattaaatattgctgctatttattagttacctatttcataggatagctattgttgccctcattttgtgggtgctcagagtgaatctcagtgaagttatatgccttacccaaggtcacagaaagacagaattaaaacccagggctctcagagtcaaagacttgcatttttccattctaccataacattcttctaggctgaatggatcacttcactatttagtatctgaactctgtgcattattggccccagtgccttctctcatgttttctctttcttagcattattttcctttttccttgaacctccttaagttgcctttgtcttttatagtgccagcaaatttgtaccttctggaggcttttcaagattgtttcagagtgagactccatctcaaaaaaaaaaattttcttgccccacccatactcagcctttgactcttttagtgtttaatagtttgattaattgttaagttgtggtcataaatattaagattatggagtttaatataagtcctaaaaagcttagtatttgaatataatagaaatggtagatgcacctaatggggaactttcaaacctgcacatttgtattctttttccaaagcagggatctgtcctttccttacagaatgaaaaaaaaaaaaagaaaaaaaaaaaaaaagtcttgaatgtcctagtgttctagtgtttgcataattgcttttcatccctgctctctgctaattgcttttaaggatctctgctacatcctgcatttcccatcattgttggattttattgacttctcttagaaagccagcctgatatataaaattctattatcttgggacctttgcctgtgatgctgttrtgcttttagggaagacagtggttggttccatgaaaatggacctgtctggaatacactggaatttcataatctatccagaaaaagataaagcccagatgataaataccagaaccttttgctcctgtctctttggcgaaaacaagtggtgtttggcttgctctggtgaaggggtcatgggctgtcacagaattcgaaaaagatattttgatattcaggccgggcacagtggctcacgcctgtaatcccagcactttgggcggccaaggcgggtggatcacgaggtcaagagattgagaccatcctggccaacatggtgaaaccctgtctctactgaaaatacaaaaattagctggacatggtggcacacacctgtaatctcagctacttgggaggctgaggcaggagaatcgcttgaacccaggaggcggaggttgcattgagccaagatcacaccactgtactccagcttggygatagagcgaggctccatctcaaaaaaaaaaaaaaaaaaaaaagatattttcatattcaagtaataatatattttggaaatctaattttctcagttttgtatccaaatatcatgaagtcaagccagtctactctgttctgtgatgtggaaaatctctgctgtgtaattctcaaccatgactcttggggaaggtttctttgtactgtggtataatgcatgtgatttggctcacacttctggaatacctgctgtattctcagtgctgggcaagtgctgatgggataccacatctgacttaatgagcttttgttttatgtcctgttgcttgaacaagtagactacaagccctcaacacctcctatagacaaagaaaaacaatctaccatttattgagcatttacaacacacattatttaatataaatcttccatcaattctatgagttagttaccattattactccattttatagatgaagacagtcagaaaggagaagaataatttccccaaagacctacaactagtgaagacctgagccagattataacccagttcacctggctccaaaaccaagacttttgattgatgtgccataaatgcaggggctggcagagaaatggataagcactagaaagtatagacctaccatgttgtatctgtgttatcagccccttctttacttagcaatgtttattagcctttcactatgctctttctgaaataaagctgattttgtttatgtcagaacactatgaccttagctttttgacctaggctcacagtaatatttgctcaatgatcataattcattgtgatttacgtcttaagaatataaggaacacctgagatctttgtgccaaattcagaaggaatagagtggttttgttttcttctttgcttttttcttcctcatcttccttcattctgactgtagtccatccttggtttcaattcatggcaagttcacagaacctagcaataggttaaggaaaggaaacttctcagccaaatacatctctagtatcaaaatctccaaatagtggctggaaaggattgttctctaaaatgagttctgtctttagaatattttaatctattttatgtcacaaatatgtattaagtgcttgttatgttgagggtgctaggtgcagtgaagaataccaagctaagtgaagtgaactttgccttgaagaatgataaggtgcattgccttctttctcaaaacttatgtggttctccagacagctggaggatataataaaacacaaattgctaaggcctatctcctgagttttgattccagaggtttgggttggaggtctatagttcgaacttctaacatgttcccaggtgatgctgatgctgctgtacataatacaattatgagagtcttttatctactgggagaaggtcagttctcacctctgagccagtatgatggagaaggatggaatgctaaaaccattcttgaacaacaaggtagtcttatgcaaagactatgatggccatgtgattaagcgttgtgaaaattaccagtagaacatagatcaatgcttttaaaatatgctttgcaatatgttaaatatgtgtatcaatatgaaagtatatactacagagaataatatgcctaagtacaacatccacagaatattttcatgttggattaagcttcctggctttgagttagggttgatgtcaattgatccttaagtagtgtgtaaaactttgtcaagaaatcatcatttaatgtgttgggacccattgaaagtgatattgggccgggcgtggtggctcatgcctgtaattccagcactttgggaggctgaggcaggtggatcacctgaagttgggagtttgagaccagtctgaccaacatagcgaaaccctgtctctactaaaaatacaaaaaattagccaggtgtggtgatgggtgcctgtaatcccagctactcaagaatgggtgcctgtaatcccagctactcaagaggccgaggcaggagaatcgcttgagcttgaacctggaaggcagaggttgcagtgagccaagattatgccactgcataccagcctgcgcgacacagaaaaactccatctcagaaacaaacaaacaaacaaaaaacaagtgatctccagtgtttgcctggggaagacctgattatttgaaacaatccggagtttcttaatcacttgagaatgcctacataatattttagacagatcaaaacatatcatggaccagaagatctcaaggaaagaaacgtaatttgaactagaacctgactgtattgtatggctctcctcaacaatgtggtttttcaccttattgytttaagagcttcattggttgaatttgtgctgatttcactagttgtttggtattgatctatgacatgtaaagcacctggcccagttctagccacacatttggcatcaaatagatgttctctgcctgaaagatgtgagcagaagacctaagagaagtatttgaggtagaattattattccaagtttctgattcatacaatttactctttcttccgtttttttttttttttttttttttgtctctgtcttcctgctatataatagcccattttgtttaattttccrtaggaaagaatagaagatttttgtcagtctcaaatcaagtatctggtattcggttttcttttggtagcttctcccgaaagcctgttaaagcttctcaataacttgtattgaaatagatgttttatatttcacggtgttctcattaagctgatggagtactttcactcacagcttagaatggagtggcaggacaattacctacactagtcttacattttactgtggttatcatataagaaaagaaatccttcaaataatttgtcctttttgaaaaattggctgtccattttaagttctcctacattgtctgaagaacataaaaaattatgcgatcatgctcttcctcattgttggttttgttgtgctcaggagccttgaacttgggcaagtaaaaaaaccacagttgaactcaatctgttctacaatggaggatgtgcttagtatggcatgggaaactgtttcagaaggctctgctcggttacttttgcagcgttgttataggctgatacagcaaatcccaagacttggtaaatatccttcctgaacaaacacaattttaaataccactcataaatgtaacataaaattatttcatgattatgtattttagtttctaataattgtcaagttctttctctggtacagtgtgaactacagtgttctttcatggcacagtgccagttattatttttggatctctgaactcattgatacaagccctttacaatttcccttacgcttcttgagtttgggtgttgatttgataatgacccagtgattaaacaaaatcatcataaggagacaaagataaggaacaattttcactaaatggaagtatttatgtcattacctactctctaaataaggttacaaatactagacaaaggaggtacacctgtgaattacaacataaagagcttctgaattgaagagttacttcgttgacrtttgtcatctatttgtcaagataaatttaaaaaaaaatttgtgacaaaaactggaagaataacctattgctgttttggaagtaatttgttctatttgtagatagctgctgctgattgtttctttgcatgtccattgagttttaaaatctatttcactttgacttcaaatttagtttttttaatagcaatttttcatttcatttaggaacattaaaaattgtatgcagccttttgaaattttttaatcatgcaatgtcattttcttgctttgcttttttttttctcaaataaagccatctgtttagtaaacatggaaaatggattgatatgcaacccaaaaagttcataatgacaactaaataacagatgacagattagataagaagaagtcattaagttggcctataaaaggacagccatctgtaccactaaaacaatcttccaattgatggcagtaataattttctgagtccatgacagctaagaattgctagaataaaatggaaagcttgtaaatcgagaagtggaacttaattttgggtaattagcctaactattttgttccagtgttacatgacgagtggaggttacaacaaaatcctttgagaacaaaaaacatttattctgtgtatgcatgtgtgttttatctgacacacaaaatgactaatttacccttcttttgtttgactgaattatttaaaaatgtagagagtctaaatcattgaggattaaaaagatttatgttttaggattctttaaagttctagtttacagataactgattgataactaaaacataaatttactggaaatgtttaaggataagtagtcacagactcccggagtgaaaaggtccataggactaactgccctggcttagccagtcctgtcctcaaagtcaagtccaattttatgatccctaacaaaatactaaagaataacaagaataaagtatactactgattccctaagataatggtttatatttagtagagttaagcagaatcagccatcagatattaccaattggaccggcgtactttgagagaagccatatttggtgacatttaaaaataagattgaattagttggctttgatatagaattgttttttatattcactctcagcagtgagctaatcctctcaataacactaaaatatttgaacctttgctttttaacacggacttattattagaattaaatttgggaaaggtgacttaactggcattgaattcttgttctgataactactctgtatctgtttcttcagactgggttggcttggggctttttcgagaatcatcttatatcagaacctaaggagatactaaactgagtctgtttttagcagggtataggaatrtatgccttcaaatcctatgccttggattttcatttttacaaatctgatgggccacatatatgggttggaaaagtttaaaataaggataggaataataaagtaagtcactaatcagtctgcctttcacaggtaatgactaatactattaatgtgcatacttttttactatgagtttatgtatgctttaaaaataaaataattgtattttaaacaattttggtgccatttttcatttaatatgttacaagcatgtcatatgtcataaaaattaattatagcataggagtctattgtatcacataccattttttatattgccacttttttatcgtgagacatttggattctccagcccatcatcgtgatagaaaaatcctactacataagtctctggccatctcttcttgtttccttagagttctaagaagtagaatagataggataaatatataaaatttgttaaggttttggggtcatattaccaaatttctctctaaaaaagctatcagctgaacaggactgtatgaatgtcaacttctttacacacttcttataaatttttaaaaattactgcaattttgaaagtgtgtctgtctcattttaacttgatttttgcttgagattgacttttttacagatttgtttttcagccactcaaatacttctgggaattggctattctgtatcatttctaaagagttggctttatttaatgttattaatttgtaactttttctaacaaaagctctatgtttgcatagatgtttaaaaaaataaaaaatctcacttttttgtttgattaaggctactatgccaagcagtattcatgcttaatttgttgtctaaattgattagacaaagaagagtaattcaggtttagactcaccagcagaaggagatgtagggaacacctggtactgaggttcaggttctgtgtgccctgagggaaggtaagaaattccctttggcagttttcactcttaagcctttttagtagaccctctactgggcagagcacttgatatgtagtatactttgtatagtgcataataatcacctaagcagttaaacttttaccaaccaggcctgggcatcttacagaaaaagagaagcagcaccccactttttttaatgttttagggccgatggaagaggtagttagagaagcagtggaggattcagcttcatggtaaatgggtctgaatttttggctttcagaaggaattaggttaagtctgaagaaggggtcatagttgaagttggtaaaataatattaagatcaccttgaaatttttttaggaaaaatgatttcaaatttatcttgttaaactgttgaaataaatgttaagaactgatctccaaacaaatcaattgatcaactgaaagtgaatgccatccagtgagccacctgttttgctttaaggaattgatctccaagggaggtataaatgtaggactgaatcccccacactgagaatgcgaggccactctgaccagagggagctcctaggtaagagctcccctatttcctggcacctgacaaaactgggtaagtaggactctgataagaaatgcttttaggtcaggtatggtgcattgagcctgtaaacccagtgacctgtgaggctgaggttgggaggatcacttgaagctaggagtttgagatcagcctaggcaacatagcaagacccttcctctaaaagtatgaataaaaattttaaaaaattacctgactgtggtggtggacaactgcaatctcagctactcagtagcctgaggccggaggatcacatgaacctaggagttgaaggctgcggtaagctgtcattgcaccactgtactttagcctgaatgacagagtaagactccatctcttaaaaaaaaattttaaaaaagaaatgcttttagaaaaagcatagctttttgtattaaatatgagttaatatacacatgctgcttgaagcaagatatgaaagaatttgacatctgggtatagtgagtacctgtgatatttctttcaattttaacatgtgttgagttgtacaattcttagtttcgtattgttttgtatgaatcttttacctttaaaggaacctgttttaggctcaccactgacagaytgagtgcttaaaatctcctagcatatttttgtctgcatcatccaagcttattgttgcctcataattaagttgcttctcttggctcttatgcagcctctagtaaaataactcacttattttctctgcacttagtatttattgagggccttctatgagcaaggcatgctcctcagtgctggaaatacaaaaatgagagccatggtttcttatcttaagtagcaattaattactccagtggataagacagtcaccggaagagctaattacgatacagggcaagaagtgaaatgatggagattgcacaggatgttagcaagctataaggaggaacaaacttatcaaagaaggcttcttyagggtaagagctagctaattaaatctttagagggcacaggggttagccaggtctaggactgagaaggaagggcatggtttctgcatgggtctataagtgattttgttgtgttaggaaataagatatgagcagagaatgacaaagatgactgactggtttccttgcgagctgagtactagactattagattctctagattttcacaaggccccagggcaagtagtaataggaggattctataggaatgtttatcttgctttcctcaccacatcatggtggtgtttgcagcattttacaggtattatcagttagctcatcctttgcttttatctgtagtgatagcaaatttttatgatgcaacttagaagtattacaggtaataactccttcaccatagtctccatttccctgaccctgctcttgactacctctgttgcatatatcattagacaaaattataagtcaaaggaagaaaatgtgcctttctcattttctgcatataaagttacaccagacctctctttccactatgcccatcaactgtagaactcaaggtattgggctgctgtgagatgaggtggcttgcgtctgagtgtaattcaatgtattgcttccttcattgagaaagtactattacaaaaaataaatatcagtcaaactaaacaatgtgcctagtgatacagttaattaacattaaggggtaggccccttgtattagtttgctgtcgctatataacaaattactccaaatttagtggtgctaagatawcacacctttattatctcatagttcatgtgagtcagaagttcagacatgggttaatggcttttttttgcttcagtgtcctaccaggctgcaatatagcttttggctggggctgtggtctcatcagctgcttgactgggaagggatctacttccaagctccctcaggttgttgacagacttcgtttctttgtggctgtaggattcatgacagtttgcttcttcaaagccaacaagggagagagactctygagtgagtttgctagcaagatggagttttacataacataatcatagcagtaacattctatcatctttgcatttcttttggttggaagcaaatcactgacactgttcacactcaagagaggagattacacacaagagcatgaatacagggggctggatcatggagtttacctgttcatcacgcttatcttagaccaaaaaagaaaaaaataggttttggagtggcaatattccatagccatactttaagtagcactgttggtggaatacagggaggaaggagggagaagaaatgggaggaagtcacctcttacttgtttttagcttcctggaccaggaacaaaggtgacatcatctttgggaaagcacaaatgcttaaacatgtgtcttatttgttctacataatggttttaaaaattgtgacgttacgtacaattttggagataatatgtagaaattgctatttgtggttccatttaatatgtatatataaaatcatgggagtttggagctctacccttctacatggcaaatattggttagagattagtagctgaaacccacttttagttgggatatgggcttgccagttcagtgccatctccactactcagaagccaagtacacatgtacactattaccaagttttccctgcttgcttactatacctgccctggcttcttcaggcatctgagttgggagtctccaggaccctcagttccccagttgcaactgacattattattttaactgtggtgcttgatcctttcactcctgatgtaggtatgggagtgtgtactgtaataatctgttaattttatttctgcagaacctagtcattacttacagcatttctggtgagtggctcctacaccaataccaattstcttctattgttttatcaaactaatgatctccactgccttaattttagctgttccagccagatagacaagagaatgaatcaggaaattctaactgcttgagaaaacagatgtcaacataactaggttttaccctcatggagttgacagtctggaaggggctatgtgatgttagttataaatatgataatcatatatgatttacggtaagttaccttaygarttcagcaatggaactggctttccaacatttttaaaattgtgatttctttagaaaattttgtccaagttgtgtaaaatttaaaaggaaatattgatctttgaattgctttttctcaggaagctatgtttgctgaagtccttatatatacgtttattaataaacagtttatctttggaggcttgtatatttttggagtttagtaccttctgaaaaacttagacttacaatgaatcttttggaatatgtttgcttatcaattatatatttaaaaaatagagagtaaactccttaattgtagggattggtctgattattaccttttaggcaaaatagcaagcattccagaaaacatctggaaatccaaattgtttatattcgtccacgtggtaagcattaagacataatagttttaatttcttttatgtaatgcactatgtgtctgtccttctcacaaaatccgtaaacagcttgaaatcatggaatcttctcagtacctagaacagaggttgacacttggtggcttgtgagctgaattcagcagtagatgtattgttgagtaagcttccagcacttcaaaattcagactgtgcatacaaatttaattttgtcttttctcttttaaaaaatagaaaatgaataattttttattagttactttaataaaacccagtactactttgattttatgcaacctgatgttctatttggagaataatcttactgcaaagtacaaagcttatatgtgaatctgttggatgtcaagtagtgccatactacacatgtttatttctcttatacctacaatcagctggggtcacctaggcaaatgtgctgaggttggctaagttcaatcacatgtcagggttagctggctgggcaatgatctaggctgttcttggctgaatgacttagctccgctctaaatattttgtatccgccagcaggctatccctggcatgttctaatgctgatggcaaataggaagagcacaaagagaaatacacaaagccttttcaagtctctttccaagtccatttgctgatatcacattggccaagtcaagttacatggctaagccaagcatccaaaggtgagtcaggatgcagagtgggaagacattgcaaattacatggggccatttttgctctctgccacaagagctgtggtctaggtgcctgtgacttattgccaagtcccaggtatacttacacatgtgtgtgtcttaccttgtatttcttagaattataaatctaagctctttcaaaaaaggaaagttaataaataaatggcaatctctattcctttagtggtttttattttgttctacatgttaattttctttgtgaaaaaaaaacccaaaaataaaatccttagttttaatataaactctatgatcttggttaaaaaaaatttgacactgctatttgtgaaaagatttcaacattattgaacatatatacaagctgtttattattttgcttacaggtggaaatactgggtttaaaaattgataaagcagcaataattaacaacctaatctaaaaactctcctttgctaagtaattgcttttttcattcatttattcatccattgatttgttaaacaaacatttgtcaattcttaggtgtggttagataattacaaatagacacaattttttttttcagtatactttttgcccttacaggattattcatgttactaatttaccatgaatttctttttaaaatgaaagggtaggccaggtgtggtggctcacacctgtaatcccagaactttgggaggctaaggagggtggatcaactgaggtgaggagtttgagaccagcctggccaacatggtgaaacctcgtctttagtaaaaatgcaaaaattagccgggcatggtggtgggcgcctgtaatcccagctacttgggaggctgaggcaggagaatcgcttgaacccaggagggggaggttgcagtgagccaagatcgtgctattgcactccagcctgggcaacaagagcgagactttgtctcaaaaaaaaatgaaaagataggcatgcttggggtttggggcaaataacacaaaagtgtrtacaaaacaaaacaaaacaaaaaacaaaccccccccccccsccaaaccagtggtgatctgaagacaggattgaatgttttcaattttgcttccaagtggagaatcatctcggggctgtagaatgaattttccttcttaagacacattttcctgtacctacaggcgtttgcatctacaataactattgatgtgagagtgttacagttttgttttagtaaattgcatgagtaatcgtccccccagcacttgctaagttgatgcttccttttttaatggctgtaatgtatttgtaaacatgtctcttaacttacttgaaaacatgttggttccatctcatttatttgcagacaacttactgtctgttgaaacttcagcttcttttattctaatgactcctttgaaatattattttaatgaacctatgaaacacatcattgtattctttatattgtggttggactgctaatgagactcatccattaagtaaatggctttgtagacaatgcaaatgtaataactaaagttagtctattcttctttactacttttctgctgataggcataccacataccgagaaggtaatgtttcacgaccaaaacagttcagttggtaggcagattgggaatctttgcattggaaaaaaaaattcaagaatatcataaaagtatatttgcaactccatctattttttatcaaatcataagataatatatttcccatgtaagcattatatttctagatgatacgcctgatagaagaaattaagtgtccatatgatctacaggaaaaaatctttaaggtaataaattttaaaaatctattttaaaacataaaatttctaagaaagcaacatccataaaatggattgctacagaaacctaaattcaggtccttttcatattgacttcattatggacttgaatttttctgccttaataaaaggatgtaggtctcaaaactcatcttgcacatcttgttttaatgcaatttagttgcaactgttgcagagctttgttccttagttcagctaaaactgggttcttgtcacaccaccaggaaaagttaggcatggagacagtttgaaggatgaggggaatggaatttatttggcgaaaaggaaaaaagaaaacaaactctcagcaaagcrtgggggattcctgctaacaggtcctcatctcatagatcgattccaggccacacagatgagctgaagagcrcaggctcctcccctgggtaaggtgcaaattccctgtggctccacccacttccctcagtgcacatatctggctccagtctgctttgggcatgtccagttgacaagagctgtcattattagcattatttattttcacatttataattgaatggttttataggcttgtgacttcagatcagtgaaaacagaaagatatccttaccatgttgttatttttccactactcttataggtagcaaaagctggctaagctggtagaatttctaggtttccaatgctgtaaagagcactagcctctctaataataaaaatattaattgatggacattgcgtgaggactctctaaggagtcactgtgkatttgggcgcagacatgggcaaatgttggcagggaacacactctgcttccctagccaggactttctctattacgttaaaccagttgcccttgggattgatggtggaaatgaaatcttaaaaggaagaatagataagaccaagctttgcagagcaacaaaggtgaaaaactatccttagttgtggaagtgattttcctatcaataaattaccaatgcatcttcaagtaagaaatgttagcttaaatacaaattaatagaatgcatctgtgtgtatatacaaatatgttagtaactgtgaaaccaggtgtttcttataattgatagcatgtcatagttttcaaaaagacattttctttcttaaagtgcataaaataatggtaggtcttactactgatgtcattcaagattcaataaactgttgtaatttaggaatttagcactgtgttcctattaaaaggtccataatggaaggtaaagatggtgtttctatcttgagacgatagtctactttcatgattttgacaatggaaacaatgccatcttttagtcacaaactggatttggtagatcattctaggttctcgttctagtctacaattggttttctgaaatctaataatttatccattctctgtgagcttgaaaagcaaggagagtatccacataggtccaagccatcatgaatacttagttctcctcctagttgaacagtgtgattgtaggtatttaacaatagcaggaattggtaaagaagcttattcctggctatgagattccttgacagtaagctgtagaccaggaaggtcagtagttctcatgctgtctctaattgatgagttagtgttacctggtgtgctgtgttggaactcactgtgaggccctgcccagcttcaacagggacctgtagtaagatccaggggaatacttgtcatggacacgtactggatgtccctaataggaggacaacatatatcatctctgttgtacacacttagwaatttgttcattaccagtatgacacaaatgatttaaaatttgtgaagtatggggaaaagggattaggatgttcctaatcttaaataaagcatatgattttcataaagtttackttaaagcartttatagtgtttatacaaagggaaatttgctaatgacattgycttaagtaacatctgggatttgttttgaaatagttttgtgagtgatagtggaggtataaatgattcattatatcattctatgtctttgaaattttttatgataaaaagaaaaaatcttaaaatgtagacttttatgatatcttrgctaataaaattctttgaagtgggtgatggactgatttgataccagtttccaaagagtgttagaatacagttttcgtgtggcttatttttcaattagaaaaaaaaatcttgaaagatacttataaatctagctttattaactttcctgacaaaccctaaaagtcaacacgttatcttckaacaagtttggaggcgtctctaaaatacagcctktagctatttatgtagtttctcctcactgttcctcctccagtgtttgccttttatggcctcaagagagagcataatctgaaataatttctaggatgcaaacacattgctgaagatatgggctcatggaatgtgttctctgtagtactgacacgagtgacttttctcaatctgtttccaacatgaggcaagaatcttcagttgaaatatggagaaaatagatacaaaatacaagtatttctatgcattagctgcctaatgttcactcttctagattgctattcatattctctttgttggacgcatctcagtctgctccctgagttgtccctagttgtcatcaaacaaaaacagcaatattgaaaacagtaaaaatgtaaatgcaagacagagaatggagaagtattagctgtttccaatcaaatgctacccatcagtaaaatatagaaaatacacttcactgaagacctttttgaaataatgattaattactttttaaaggaattattctagagatatgctaagctactcagcagtaatttaaagttggcaacctgttaacagatccccgtctgttccactgaggtcggccagcttctgttggataactgtagtcatagagtttgaaagcaaagtgcaaaatgccatccttaaaattggagctgttgcattaaattatgtcacatttgatgacaggtcacaagagaaagtgatacatgatttttacaacatgagccaccaaaagcatgcttcatggaattctagtagtccaccactgttgggaaagaagttagtttctgtcaaaaattaagacagtccagggcttttaaaggagaagtaaagacagaaagggatggtttaatctcttgttgtggacaggtgtatccacagtgcatcagaatgtgggtggaggaaagaggtattctactatagatagtgatattagtcttaccaatttaaaattgcagcctagactatcatcttaaaaatgaaacattattaattaggtttcaaagggcatgatggcaaagcgtagtggaaaatttggggtggtattagtagcatatctggggaaagtggtgttaggaatatttaatacaccacctttcctcatctttaatacaccacctttcttcatcatacctacatagacttggtacaggtaaaaatctaatcaaacaacggagtgaatagatatgagctatrcttaaatagctggacctcttccttttgattgcctgctgcctccctatagttctatcttagagactgctagggagtgttttaatcaggcttttgattagataagtccattgcttcattcctctgccctgtctcttcccccattccctacacttgcagaattgcaggcagctttcagaatctcagtagattctacaaagtagaaatctcctccaaaatattagtattggtctactaggcaccctcacacagggcaatttatgttgacttattctgtagtttttttagtatattgatttacattttgaaagaatgtatagaaggtataattcattattaaaaaccaggatatgcaaaaagaagatccctggggtgtaactatcagttgttattgtaaacaaatcgctatagactctaattttttatttagaggacatcagtcctgtcttcatgtgagaagacaatatggctgagtttactaatataatttctgtgccaaaattagctgtggattagagtgatgacaaattccttgggaaggttggatgagagatcctctatgatagaacttgcttaaaaagccagtaaatgtgagcagatttccaatttttgctccaatacttttaccttctgcatttgtaatcactctttataattctcaactttcagtatctccagacaatatttttccttccattgagtcttagttaaacatcttacttctctttcaaagccaaaatcttgttgggctcaaagttttttctctttctgtgttccatgttgcttttaagtcttcatgctttacttgagggaatgggccaactcatagttttacagaattatgtaaatcatcttgctgttgatcagaagagaagaatattcaatctattaaaagcttcacaataatgtgaatgtatttaaagacacaaactgtatatttaaacattaaaatggtaaattttatgttaaataggttttatcacagtaatctttttaaaatcagaatttggtgtccaaacacaaaacattcataaacctaggatgagaatctcagaccctgtgttatatctgccacactatggaacctagcagtctattcagtgacttttaaatcctattgagtgatcagctgcctgatatgctatgcaaagagctctctctgctccttaaacattgctcatgcaattgtgtattcaataactacttactgatagatgcaggatgcagataaaaggagggtcctggagaatctctgacccaccctcacattattgggagaacagggtgaagccaggggaagttcacctcctgtgcagtggggaggagcctggcatcttcaggtcctgtgtatggcttggaattcaatgtgtgaggtgatggcctgttagcaggatcccctcttgctttgctgagagttttttttcttttttctttttcacccaataaattccaattcccttacccttcaatgtgtccacgtttctaatcctcgctggtcatgtgacaagaacctcgttttggctgaactaaggaacaaaattctgcaagattactaagacccatgccacgtacagggttctgacccaggcggtgcgaatatttccctggtagccttacacacagcctttggttacctcgcactaaaatacccatgaagacacaaaaagaaaaaagaaattcactgtaacatctgttaagttggaagtcaatctaagtgtagaatttgggaaagactgttgctaattataaagcagagagactacayagaggcatcttctcagagataagcatatagcatttcctaccttcagtctattaaaaaaaaaatcaagagggagagcaggaaaaagcaaccaatggtgtgttaccttcaaggcatggatcccaacagagyttagaacgcagtaaaaagattttctacaagtaattatgatttgtgatagaaacacakttttckcattcaatcctgcctttgtctccacgtgggcctggttctccaggcttctgtagagtttgtgtatctatgggttttaaatgcagtgcttatttgaacagattttaatttctcagtttttatttactcaatttttaaactgtactggttatttaaccctttaaaattataaattcaacatattattacaaaataatacatgcaacgatgaggcttaatataggtataccttacaaactaaagtgctgtgtggatatatccagctcaaaacaacacacccccacggtggaatgagaacgcagtcatccttctgtgtactcaaggatatactcatcgtataacaaaatccgtgaatactcaagtcccgcatttggctctgtggatctgcagataccaaaagtcagccatccaaatatggaggtatcatattccccaatgctatactattaatccatgtttcatttaaaaaaaattctcatataggccgggtgcagtggctcacacctgtaatccagcactttgggaggctgagatgggcgcatcacaaggtcaggagttagagaccagcctggcctacatagtgaaaccccatctctactaaaaatacaaaaattagccaggcatggtcccagatatttggtaggctgaggcaagagaatcacttgaacctgggaggcaaaggttgtggtgagccaagatgacgccactgcactgcagcctgggcaacagagtgagactctgtctcaaaaaaagaaaaaagtcctcctcatataagtggacactcacagttaaaacctgtgttgttcaagggtcaactgtatattctcaataattaattatcctgcagcccatcgtcttgcatattctgacatgttgcttaaaatgttctcaagtgattacatttgtgtatatttaatctttctaaccatatagttacttgtctgaagttcaagtcctcccttgatttgtatctgttcagagcagctagtcaagtcttttgcatctgaagggcatggatggtggaagggctgcagtggattaccattgtctgccatgggctcccaagaacagtgatcagaggcaatgtaccacttacttctaattcggttgtaggagataatacatgtatgttgattatgggaagagtcaccaaagaaagccatatgtttttcttctcgcttcctatttatataaaaatgtgaccttaccttcaacttcatttgcagatgtctgttcttgaaatttatttcctaaagtttttagtaatgattttcaattacttaaggctgctgcattaaaatacagcaatcatatcactgtttctgtaataagtcctttattgccttaattgctaatggtggaacaactgagttcagagaagaaaacttaaaaaaaattaaacacccctccataaaattttgaggcagaagaacctgtgccagagcataatttgacatgtttgcatttaaaatcaaaccagaggtgtcaaaacccatctgtttagttaggtcttccagtgagtgattggcaactttcagaatctcctcttttggaaataaagattctaagcctttaaaaaaaaatctcaaagtctgcaatggttcaggagaacattaaaaatgagcgtgcatagcaacaaggtgagaacatggcccaccgtgttgtctgtggatgatttacacatggtgcccaggaacaccagagcttgagttggtttctgtgcacacatctgttccgaagcacgatgtagttaatttcagtcactagtgttttgattcacagctgttacaaaatagggattccacttttgtcatgttggctacaaatatttccttctggcagatgggattcttctttctgaggcaggaaataaaattctagagggtaaatgagaataagtaaggagcttgggtaaactgatcggctcgcgtccctctgacacgtacttgaggtgttgagagccaactgtcaacagaacgcctatgtgtgctgagcaaagtgtgagcatagaattccaagaagttactgctgcctggtaagttaattttcttatcttccatgggtgtgttaggtgagaattagaaataagagtattacttttagacgtggtctttgtttcagatatggattcagatatggactagaaatatagtgtgctggctcaaaatgaatctctctttaatactgaagaggtttaggaaagttagtttacttttggatcctgagatccaaatcaagaaagaaaaaaaaggaaagaaaaattgacatccaaagaaaatatttgaaratcaaagagcaaaaatcactcattttatatataaacacacatatgcatatgtgcatacatacttacatattgcatatattatagcaatagatatcataaaattatatgtgtatattcataaatacataacagaaatagcaaatgtaaagttttacaaactatatgccagatggtatcttctgtgggtcccctcctttacactaagtctgtaaaggaggccttgttatgtctatttcagggttaaggaaactgaggtcatgcagctattaagtagtgcgctgaggtttgaggcaggcccatctgattctttccattccccagcctcttttctctttaattctgagggaaggcttaatttgcagttggtgttttgcgtatcagttggtaatttatgtgctctaataaataaataggcagtttattccccatcacagtaccaccattatgtgccatggtcttctgtattcactggtgctgttcagatatgtcataccatgcagaaaaccacatgtgctctatctttctcaggcaacatctaagtggtctagtaactgcaagtctttatgtggtaaccatgctttttgaactcttttttggaaggcagcatgtgataaaggatttctatcaattctaggtataagaaacaatctgacatatatactatggatgtaaataaaatactgggaccagacatagacatggtggcgcatgcctataatcacagaactttgagaagccaaggcctggtggagatcatgccgctgcactcgagtctgggcgccacagtgagaccctgtctcaaataaataagtaaataaataaataggatctctaaataattagatgatttacaggaatagagtttttgtggtatagatgattgtgaaaaatcaggtatatatgctttatcatacactgttatagcattggacaggtcttcgggctagtagcgattaatgggaaagctatagtcttaaagtggaatgtggtggaatttgagcaatttcttctgattaatcttagtgatgcagaatatatgtatgcttccctttatggaagattctctagaaaacgcattccatcctgtcccctgctgcatctcaggtatgacacttctctcaaggtctctacataaatgggaaaaaaaattcgaaaagaaacattatttgaaaaattaccttacaaatggaaacttgggtgttcgatttttcgaactggtaaaaatgcccaggcttgatagtaatgtgtgactgtgtattccaggatacacttcggtgcccatacaaagtacttcctgagtttgattgtacccagtgaccaggaatgcaaactgttttctttatgggattttcagacattccagtcccccaagagtctttctctgccatctctgggctttatggaaaccccaggtacacctgtatgtcatgtggtttcccagaagcctttagtgtgtctgtcttatttcagtactctctcccaggatcataactcagtttatcaaagcaactcagtgcagtggggtgtacgagacagcacggctaacttgtccaccatgaaagcctctgagggatatgagtggtctgtggtatttttgccataggtttatggttttgtcacttaagttatgcttatttgtatgtgtcatgacaaaacataacatgtatttcaaaattagtaattagcagcaaaggaagaatgattgcatcattaagcatccctttaattagaaatggtgtgtaccaagaattattcaggcattacttcatttaaattttagagatgaggagacagtcagaacacatgcttacatagctagaaagtagtaaagccacgaaaccgagtttttcagattccagaagcaggcttttaaccattatttaactgttttaactccctgatagaacttcatgtcttcctagtgggcggaaaaaaaaaatagagaaggcacaccttgcgatttttcttacctttcgataaaaaagtatgcattccctaatgtagagcagcataatttatcacattaaggaaagaattgttgtctcaattgtgawcttagcccaagaataaatgttgccaagcttacctccgtcttgtagaaaagcaaaaccataattcatcagtaatgaattttggtctgtgttgtagtttgtgtgtggtcgtggcaagtacgtaaccagtatatataaatgaaatttctgtccactgattttattttctctctgtctacatcttcaagcataacagatacactcatcaaactgacaaagaacttttttttttttttttgcttactttgacataatgcaactgcagtgagtttttttaaatagtcttagtctgcattctagtcacatgccttcctctgccctatttgcttctctctttaagttttctgaattgctaacttactgtatgttattatctaattcaatgctgtctaacggaactttctgcagtgctggaaatgttctccactgttctgtctactatgccagtagccacatgtggtcatggacaatgaggacctgaatttccaatttttattaactaaagttttgttaatttaaatagccatgtgtggctggtggctaccatattggatagcacagatctatttagattttggcagctgaggtgattcttgagcacaaaatgtgataaatgagatcttgaaatttataagggaactttaaactattttcaagttccaaaatttgggctatgttcaagtgttctagaataaagccattctttaacagctgacttttaaccactcttttcataggcattcaagagactgattacttttaatctcctttgtaactaaagaagagccaaaatggcgctcacctgtctgagacttccttttggtcagggtttttgtgcaggtcttgaatgtttcatttacttctgaatcagcaaaatgtgagtgctttgtatttgccatattagagagaagtggcaaagcagtgagccaagaagcagccccaacttggttcggcttttcagattacataggagtgcacagcttgctgctgatgtaaagcatgtggagagagcccatggagaattagttttctttcatgattgaatgctaatacttggtagtatgtggaaaaacagcttcttgcttgtacaggccaacagctgttgttatctgaaaaataatcattatgatagaaagcacactttttcatgttttctgtcagatctgtcagaatatgttctgtgttaacatatgcatgtttcatctgagaaaaaaatgtaattggtaatttaatgtatttttaaaaatttttcttagtggtaacttggagcataccattttttttaagttctktaccagcactgtctaatagaaagtaggtcaccaaagtaattcttacatttaagtaaagagaaacaggcataattaatttaatatagtttatccaacccaatatatctaataaattttaaaatgtggtcaatataaaaacaagaggtttttgtgttacttttttgtgtgtgtgtgtgctgagtctttgaaatccaggacatatctaacacagcacccgatttgggctaaccctgtatcaagtacccaatgatgatgtgtggtgattggttaccctcctgaaccgcatacactgtagatgctcattcctggcatagtgtttgaatctgtatgtttgaatcatagtgtttgaatttatgtgggttgtttgcccatgtaaatgatgaactatcaaatgccaagcagagatcttcagtttatcagctatgttacctgttgtcaactgaatttagtctaaaaccttggtcaagggggaagacaaggtacaataatrtggggatgtttataagaatatacttactgcttaaaatttttctagatatttttggtgcaattcaagttttttttaagttgtggcaacttctgaagatattttaaattttaagtttataggaattttgacattcttccctctatttaaacacaagagccataaaattgactattttcctgtgaactactttattttttcctttacaaatcagagattatcttgtgtgaatgtccttgttatagtgttataaaacaaccctatcccaattaacttcaactagtaatttggtctttttaataaaagtttacttcactattacataattttgtccatttaaagcaaattttgaaaaaggaagttttgttgggtacattgtatgggactattttcagttgttgttaggaaaataatttaaaaagattctgtttcttatatactatagccatacaatttcttgaatgcaggtagaaaaaaaatacacacaggctgtacattaatcacagatagttcgtttaatcaatatatagtttttttgtttgttggttttgttcttgagatggagtctctctctgtcgcccaggcgtcgcccagtctggagggcagtggcgtggtctcagctcactgcaacctctgcttcctgggtttaagcaattttcctttctcagcctcccatgtagctgggattacaggcacacacaaccccacctggctaatattttgtatttttgttagagatggcatttcactgtgttggccatgctggtctcgaactcctgacctcgatgatccacctgccttggcctcccaaagtgcagggattacaggtgtgagtcactgtgctggccaatacatcagtttttaaaagtgagacactcaacccaagtactgcaattcaggtggaacttactgactgttttggattgtttaaacatcctcatataaagtaaagtctagagactcttgtattattagttgagtcctgaatttgctcctttaaaattggtctgagcctcatttccttgagtataagtaatacaaccttgtgccaactggggactcagtaactgttggtcaggcagatggatgctagaagtgactccaagtccaaatctttgtacacactcaggattggctcagcrtataactatacaattattttcagagaaacaatataatagaaaatattacatggttactgaaacaccaggggttcagtctaggtccttccatttgtttcatagaaagccagtcactgagacaacaagtattgccaaggaagaaggctttaatcacatgctgtaactgaggagatgggaagtcagtgtcaaacccatctctctcactgactaaaatgaggggtttatgtagcagagaagaaatgtaaccatgtgtaggaaaacaggaattagggaggggtaagggagagaagttgatcaacaggaagcagktggtctgttaggcaatcatgatgggtgagggatctgacatctcattgtccaaatacagtaatctggtgagtttcagctccttgatcctatctgggaggcctgacggttggtttcttgagaaaggaactcagaaaagacaaacataactttctcatgttttaagactgggagaatcaatttctatgtttattaaaataaatcatacacattagctctatgggacaattkggttggtttcaatatgtaggaatacagatattttaaaagtatgtaatctaggaaagtaagtatatatatgacatgcaatattatgtttttttcttaattatattttttctttttaaatttgctataatttgtagaaaggtcacaacaaataaagaagtttttaaaagttcaattggtttgtaattcaaaaaaaaaacagttcaaatatgccttttagggcacagtatcttaactgtttcagcaatactgtttttcacatgtggagtttttagtgtaaactaactgtatctacttcttgggctccattagaagcaagggatctatgatttctttgggaaatagcctaatggtttcatatctcaaatgatacctttgtttcccccttgactcatgggagagcaagagcacaattaaattgattttaaatcacatttagcattatgtatcgattagatacaagtgctctgaagcaaatgtcacattgttcagcattggataacagaagcaatatgcgctttcatttctgttaagtaattcagccaatgttataagtcatgagagtgagatacacgtggctggtaaatggctcccaaaccttgttattgaaatgcagccttcatttcagtttattagcttgttccttgttctcatttatactttattaccttggaatacagtcatagtatactggaaatggagttttctttaaataaattgttcctaaagtttttaaagtctttcgttaagtggtgtctaggagcagacacaatgtcggccaatgcaggttttgagataagggagggcaaaaatcttcctctgagttggctgtgatagcatctctatgtccctaacttgatttctgtcatctttgtttctggagaacaaattcttggttgtgatagggatggagtggtgggggaaatcaaggaagggatggctcagaagagtagaagctggttatataaagcctcatattgttgaaaacgattctccccaaaatagttgccttttcacatctagggacagaataatagcattaagagggaaaatcagtcttttggaggttcccacaggttccacctgtgtatatgagattcagaagtagtgtgatggttaacacccattcctagatcccacagccctctggggaaaagaatgatccagctagtttgtctatttctgttgctgcatgtccatttgacacctagctcgttcttcattcataatcagtttctttctgtgatgatactgtctgctcgaattttcctccatcgtagatactctagtgtctgagcagatactctatagccaagcatacctccttgatcaggccagaggctcagtcatcttgggtaggttggaaaggcagcagtgccacagatgctgcagccaggctacctgggttcaacttctggctttatcatttaggagttttgagatagtagaaaattttcttaacctctctcataccattttctgatatctcaaatgaggttaatagtaggacattgcttctggggtagctgtgaataccaaataaattaatatatgtaaagagctaaggacagtacctagtatagaatagatatttaattagcattaatgaaagaatctagtggcacttgttctagtttgcagctcccttgttggatacacccctcatttttgtgtacatggtacacagaaatggtgaggaaggacaagtgcattcaggacaattgtaccttaataatgtgggagaatcatgaggtacagatcttagggcatgcttcctggagtgtcagtagagtatatttcttttcttttctctcttttttttttttttccgagacagagttttgctcttgttgcccaggctggagtgcaacggcgcaatctcggctcaccacaacttccacctcctgggttcaagtgattctcctacctcagcctcccaagtagctgggattacaggcatgcgccaccacgcccagctaattttgtatttttagcagatacgaggtttctccatgttggtcaggctggtcttgaattcctgacctcaggtgatccacccacctcagcctcccaaagtgctgggattacaggcgcaagccaccatacccggaccgagtatatttctatgttaaagaattggagtgacaaagaagctaccaagtcttcccaacctagggcaggcatgagggcagagttagagattgcctaaaattgtgttctttgtcatctaaaacatgaataagccaaagttcctgaccccaaggtgactaaggtctgatgggaaagagatatgaaaagggcagttataatgtatagaggaaacatgaaacttggcacttagggacatgtggggagaggggaacctatatccacccatggaaagaatggaaaaaaaaatcaggaaagggcactgagaggtgcaagaaactaggaggctagctaagctgatggatgagtaaagaaaggcattccaggcagaatggatgaacatcatgtacacaggcctggaggtaagggtacttcatgaaatccagagtgtctagagcatagtgtaggtgaggagaaaagtggcagtaggtgagttggacttaagattgcacaagaccttcaactccacgctaagatatgcaggggattctggtgacaggaggaagccttggaagaatcttgaaaagggagaggttgtggtcacatttgtcccttagaaatggaggtctggctgcctttcaaagaactgagggatgtgaacaagactgtggttgggagcttctgctttaaaatatgcacactcctgtctctgttttccaaggcactcatgactttgatgttcctttagcttaaagccatatatagtctgctcctggcattaggtgacaagatgtaattgtaacacgtgtaaatcagattttgcaatcccgttctgtagacaaccaaactgagattgatgcatttccagtctttcacttctgtaaagaacacagcagggaacmaccttgtacatacatcttttaggcatttgtccaattatttccttaggataaatttctagaaacgggtttsgtgttttagagcttttgatatatatggttccagaacaatctggatgcctgaaatcatggcagataaacaggtgctgagtttcgtggccatgctgaaagtgcagacgtagaagtgaaatgcacagtgaacagtcatgcctggatgggcacacatgccgaatttttgtttggatttctttataccggtggttgtctccaccggtggcagtaagactctgctggatgaggacctaagactgatggggtgtttgtctataatgacaagtgcttgactgtagcagcaaatgatgagcagccctagggagacatcaccacccacttgagagagatccatgaagggtttatgacccgtttgaatcctgatcgagcattgctgtcttgaccctccaggaaccaattgtctggaatacttgctctgtcagtctgagtgatgtgcttagaatcccgggagcccagttgtttgtaaaacacagagtgaattatcaagaagacttagagactggaaatattttattgccagattccacagccatttgctaaatgtattggtgagatcatgaaagccaacatccaatatgttggattaccacaatcggctataagttattatttgaacatatggggcaattaatttttaatktgatgataccaaataaaatggttttgtctttcctgtttgtcttttttctacatcaggagcatttacttaccatatagatgcaagtmtttttcaaagttctgtagaaatataaacacacatataaattgttcactagtagccacaaagtgtgtgtctagtcttctgagaagtttcttaaactgtctggaggggcagagggtctcacaggaggtgacatgtagctagaatagaggtaagagcaagctaccagagctgactggctttgttctgattgcttctttctgctttgagatctttttgagaaaaggcaggaatgcagatggaataggtagagtcttacggtgcttggctttctgctgctagttactcacctaacttcttttccaaatcttaacccatttcccatgctatagattgttccacagttaaaaagaaagaggggtctgcttgcctcaagcagctgggttaggttcatgactacaggttaagatacagcactgttatgattagtagttgcattgttcattgaacaatattctctatttgcttttctgtccactggtaaagaatgtcttgttagaatcctctagtagtggttcagattgccaggggtcyctagtgaggaacacggtattttctgtacacagggaggctgctttcagctgtttttwaaagctaatggctaatggctagaacactcagctagagaacagtgatcacaaaagcttcgataaatgttaaaatggttagctaaattagaaaaaaaaaagtagaaaatctcttgtataaataggtgaggggaaacatcaatattgctcattgaacagtctattcttctaatttgaaaagaacaactatttgtcatggttctcatccttgagatggcagttaactaattaaatccatatgaaattcaaaaggctttgctaagggacagtaattttcctgggttgttgttaaagttgctgggatgaaagaattactttgagcagataatggatggattcttctattgtgtattgaggtcctgaatcgactaatcatgctatggttatccatcagtgtgttaccttataatttgaaattaaaggcaccattttcatttattgcttactctagaggtaatgctgcttccaatttgtgaagactgtgacctgggtgggaaaactgctcctggtaaagaccacagcattaatcaagacacatttttggcttggaacagctcattgtatacaggtggggcacaatcttattattggtggtcttttatgtaatctatgtcaagtgtatggaatctgaagttttcatttctgtactcagtaggatgattgatatggtttggctgtgtcccccccaaatctatcctgtaattcccataatccccaggtgtagtgagagggacctggtgggaggtaattgaatcatgggggcaggtttttcctatgctgttctcctgttagttagtaagtctcacaagatccaatggttttataaagggcagttcccgagcacacgctctcttgcttgctgtcatgtcagacatgcctttactcttccttcgccttcctccatgattgtaaggcctctccagccatgtggaagtgtgagtccattaaacctctttttcttataaagtacccattctcaggtgtttcttcatagcagtatgaaaatgaactaatacaatgattttgttttgatcttaattgatccatgtgttagttgctcagtctgccactctcatctagatccctgtctctgctcattcctgccttactctgtgttcagtgcctgcccttcamtttccaatagactacattgcctgtgctcccttacagttggattggatctgggattgacaagcatggtggctaggctgaaaatcagaggactggagcagaaggaagttggggttctctttcttgcttcttccctgattgagtgagcattacatttgacattgatagtccttcctccatgttttagctctcacagggctctgggatcactgtggcctccccttgccctttgagggatgccatgacctcctgctcttgctcttgtctgagtgcctccacctcccttcttgtttccttcscctgccagcccctccattaataagccttttattagagtctcttcatttgaaccatctgaattgaattaggttcccactgggaccctaatataggtcatttagtcaggacagcagagaccatctccagtcactgaggacaaactctatgttttacttacccattctgcttttaatacctgttaccttaaaacatctggtagtggttgtcttttatgagagtcttctttgttctggaatgataaataggagggttggctggtttggagttatcacattcattcataatattaaatatttagcacacaccatatgcaagacatggtctacaatggagttggcaactatagctctgggccacatctggtcctctggctrtttttgtaaataatgttttgttagaacatagccatgcccgtttatttatatatttattggctatggctgtttttgctctacggtgtcagagctaagtagctgcacagcagagattgtatggcttgcaaagcctaaaatagctactctctgacactttactgaaaagggtgacagacccttggactagatgctgggaatatattggtaaataaggtgggcatcctctgtcatccagtcctggggacacagcagtgaacaaaacaacttcaaaccccttccctggtggagcacattttgttgtgggggataaagaagstgatgaagaagatggaatatgaaacatagactgtgttatagaggggtaagctctagggagaaaataaatcagggaagaagcctaggaaatgttgtggttggcaggtgctgtcactggtgcaggaagcctggggacgacctccatgaggaggagacctggatcctcattttcctggcattcacttcctgtttcccacctcttatctctctcttctcatttatataattaacattgccagatactgccaaattgaaatctgtaaactaagagtgttatttttcgattactgtgatcatggaaagctgagggaaaacataaccttgtgaaattcttcttccagaaagcatttttacatttctcttcttcagcaatggggagatgtgggtcacagcacaggaaakgttttactccagcttcatcctttagtcagcagtcactactactagtagctctggactcaggcagaaaatactgttaaggggacatcgtccatttttwaaatatcgtacacagtaattaccattcactctgggaaagggtgagggggcagaagcaaacrtggtttaggacaggggtccccagcccctgcgtcatggaccagtccatggcctgttaggaacctggccacacagcaacaagtgagcagtgggcaattgagcaaagcttcatctgtctttacagccgctcccccatcactccattactgcctgagctctgcctcctgtgagattagcggcaggattagattctcataggaatgtgaaccctattgtgaattgcacatgggagggatctaggttgcccgctccttatgagaacctaatgcctgatgatctgtcactgtctcccatcacccccagatgggaccagctagtcacaagaatacaagctcaggactcccattgattctacattatggtgagttgtagaattatttcattatatattacaatgtaataataatataaataaaatgcacaataaatgtaatgcacttgaatcatcctgaaaccatcaccacccccctgccagccccactccacccccatctgtggaaaaattgtcttccatgaaaccagtttctggtaccagaaaggttggggactgactgctggtttaggatgttgatgaatttattgccagctcatggtcaagttcttatctcttctgtgttatatgacaggaagtgccctcgcttgatagtatttgcatcatgttcccctttgaatgcggaaattaagtagatccctgccatcacgtcrgtcatgattacacacatttggaaacatttcaagaacaattgtgtagtccaaaatgtaagtgcattcaataaaagcataacataacatgattatcctataaagcgaatctccttcctggtcctctccactacagtaaatgccctgctggcagggcagaggacactgactgaattttattctgaagtgtccattgtagtttgactctgtattgtaaatcctctyttgccttggtttatgatgtttgaaatgtcttgtactgtagaaatttagctttatatctacatcattgttttattcactaaaacctgttagattaaaaatgtaatgaatgtatttttagcaacagaataaatttagagaagagtttaaaaacccaactctgaaggcatttctagatgctagattattgctctgtagctttcattaattacatttctaaaaaacaaattgaaaacaaaacactatcattgaaaaaaatgtatgtaagccattttatgtcttaggttatgctgacagatgtgtaaagaaacttttaaacatttcaaactctaatactcmtactgcatattatttaatttatcaaaagtttttagtgacagtctaaactcaatatgaggcttaaggggcttaataatggtaatttaatttggaatcttttgrcattttaaaaaccctctggccagttaacagaacgcaataaaacataattataaaaatatgtagcatggcttcatatttctacatttccagggtatgtttttcttctttaatcatctattaaaaacatatatgaataatatgaaaaaaaattgttttctctttcactctgtttttttgctgtgaagtgttgacctgctctttggaaaatattaagaatgaaaattccagggatatattagcacagtagaaacagtcacctttgtgtgaccttcagaaaccttcagaaatatctagaatgctcattatcattgaattactttagtcattatttgtagtctaagaaaaatagaaaagcctttttacccttaaaaagatttgaatctgttgaaggtactggcacagtaaccatatttgttcaaataaagaaaacagtayaccaaggtatatcatcagccaagtaatatgagaagagggttaaaagtgattaccttaaaggaagcaaagagctaaagagtaaaamaaatgaataattttcaagtaatcaaatcaagccatatagtggacgmatttgttctttttctgccttttgttcataaccatgcttagcataacacttyagctccttaatcccttttcaaccacaactctattgtcagttgctagtaactggaattctttttttttttttttttttctgatggagtctcgctctgtcacccaggcttggcgatcttggctcactgcaagctccgcctcctgggttcaggccattcttctgcctcagcatcccgagcagctgggactataggcacccgccaccacgcccggctaatttttttgtatttttagtagagacagggtttcaccatgttagccaggatggtctccatctcctgacctcatgattccagcctcagcctcccaaagttctgggattacaggcgtgagccatcgcgcccggccttagtaactggaatcttgaggggcagtctgggtggtcattaaaaacagggactctggggttayaggaccagggttttggctgttactagcakagagatttggggcccattacttgacctttctgtgtctcacaagtttgttaatgaggagtaaatgagttaatacttctaagtactgagtttacttgtatttgaatgcctggtgtatcctaatacaaccagctgtttcttatcagcatcatcattattgcttctattgttaataagatttcatttcaacaraggattctagacctcaaagcagggttaaaaaaactgccctaccttggtgtttctggcaagcttgggaagttattccctttcatttctttcaacccttctcattagccagggggaagctttctcacctttctagtatttgctaatcttccttataacaaagcgtgggcaggccccaggctcagagcctcaggcagggatcccttccggctasagtttaatatccttttgtttcaaggttaacagggttagmtgtctatctgtggcaagtgatactggttttccatttatggtamagatagaatgtttccatttaagtcaaagtaatttaaggaggaactgagcagatgtaaagaagacagaccggaatgatagtacaggaggcacagggatgtgagcaaaatcatgaagatcaacacagatggggatctgctccctaggatttcckcctctccctgtggagtctggaaacctcagtgtgacctggccttgtttccagcctgcagggcgatgttgtaccatataccaggttgtatgacctccctgggcttcattttccatgttctgttgggacactggctcactgagatctctctaaccggcttatgtggaaagtgtctcatcctcaggaagtactcaaaattggccagtaggagtcttttagctttaaaattctcatttttttctttattatccatgtagttggcaaagtgaaaataatgggaaaatttagtcaagcacttagacgcttgacgttatgtagatatcatcactgactacgtatttcatgaatgtgaaacagtgattcccggtggtgtcctgggagccctgcgtccccttgagggaggaggtactttgggccccagtaggaggagacagggccttaacaatttggttttaagacattttatatattttgcctctgtgtaggatttttgcaggaagttggaagtaggagaaagggtggggagaatgctctacttccatacaaaaaaatctaaactcatacctaaatagtgaatcttacatttcctgtatgtctttgttgccagtcttctatacagtccttctgctccttttattcaaagtgtgacatgtttagggaacattctagttaaacattgtatttttttcataattcagacggttcaaatttgggatatcatttcctctgatcatcttttatagtcgtcgcagtttctgtctttgtaatgtgataatcaagggcacaaaaatagtacttcctcctctacctctttctttatcatctataatgattatttctcagattacagtgttgtgactacccatgtgatcatacgattgtacttattaatcttttcccagtttaacagtgcaagtgcaggtttcaaagaaaggtggctggagacattctgggtgaggtrttayaaataacacatcatatcagttgtgggagctgaattcttgtttttcttgtccrgtgcccttatttaccaactgggtgaacctgtaaaagtcagtgaatctctctggaccttagacttcttgttaataaarcaaaaggattatgtaatataaagttggagatggcctccaaggtcaaaaagttgataattcatttgtgcctattgactcaaactgtaattgggtataataacaagtctttccctgtgactcttggtaagttaatgggrtgtcacatgtgatgacacatgcaaaaccaccttcacattgtagtatgtcatgtattataagtatttataaaaccaatgtgatgtactactattagaaaaagagacattttagtgctaatatactscaggatctcctgaaatacacagagcaggagttccacacattgagcaggcatcataattgcccagaaaagcataatgaaaataagctgttgggcccacggtatttctatgggctgtacctggacaaatgtgtttcttgaaaattccatgggaaattctgctgtaaaatgagagttgagaagcatggatgaatattgctaaggtctgaatgtttgtgttcttccaaaagttatatgttggaacctaatacccaacatgattctattaagaggtaggaccttctgggaagtgattaagtcacgagggctctgccctcatgaatgggattagcaccctcttaaaggaggttggagggagcttccttgccccttctaccactgaagatgcttcaagaaggcgccatcttaaagcagagagcaagccctcaccaggctctgaagctgccagcaccttcatcttgggcttctcagcctccagaactgtgaaaaataaatttctattatttatacatcacccaatttaaggcattttgatagagcagcttcaatagactgagacagaaatcatattttaaatatatacagagagaggagatcctcagatttcagcagttctcctacaggctttggagttcctctgccccttagttctgggatcttgtgcaagttttgtaacccctcaatgcctgattaygcatctcttaagtgaagataaccttttaggtggctataagaattttttttggttttttgagacctagtcttgatctgtcaccaggctggagtacagtggtgcagttgtggctctctgcagacttgacctccggagttcaaacaatactcctgtctcagcctactgagtagctgagactrcaggtgtatgccaccacgcctggctattttttgtattttagagatggggattcaccatgttgcccaggctgatcttgaactcctgagctcaagtgatctgcctgccccagcctcccagagtactggaattgcaggcatgagccactgtacctggcctgctgtcagaatgtaatgagatactgcctgtccattmttcgcagggtgggaagcacgtagtaaatattattataactgttgcttagagttggggagtccctgagcctccacaaaggagagaaacaagcatgttttcggtatctgtgatcacatggataacaggttcaaagaccttttactgttttcttcagtctcattaaaatttgtagctctgccattatgatggccatgtcatttgatttagtgtacaattgaacatgttttatttaataaattagttaaatagtgatcattacgatttgggtttcaattgagtccttgaggcaatatttgctgatataaaaatattaggtaattttaaagaattatcagaaagattaaaatattaatatgttcctccatttcaaatttatatctccctaattgtaattatccatctttcttatgttacttgtaattttaaataaattatagcacaagttttatagaaatcttttcattttatttgattggatgtttttgggtaagtttatcattttttaaagatttatgtgaatgtctgacattgataccaggaagataattgctacccaattcgaatgtgacattcagagcataccatttttctcccrttacagtgattggacaaggattaatatttgaattaaaacagagtaagatgcattatgtttagcgttacagctgttaaaacgcactttattagccatcgtttatgatttaattgaaatcctattttttttcctctccagttagccatttttgtcacttgctattgcttctttttggtttacttctggcacttaagcctgattttcaggttgttgtcttgaaaatattttcttaaccaccacctagtcacaataacgctgccgctatcctgcgccacccccatctgccccagttttccttcagagagtatgcttttgtctagaagcttatgtaagaataaacaaatttgaaatgaagaggaagcttaacgttgtaattgtttttatacataaacaacgtaagagtgtcaacgtacttggatagttttctctgaatttaaaaagtttattttaaatggtgtaacttaaaatgtggtctggatggtgcctaaagaaactcaccttagagggattttgtgtgggagaaattaagatataagttgtcatcctacggagcgctttaaattgaggtactgaaagagcccccagtgactgcggttttgtgagagctgctattgtgcatcctcttaggtcgttttcctgtttttcttcctgataaaaccctgttttgtgtaggcacctaccctaccccttcccatgaaattaaagaaagatgattctaccctcagaaccaggagtccatcctggcatgaaaagaccaaaagtcggcaaccccaaacgaactatggtaattacagtgcaaccactgctggggagaaacagcccccctcagtgtctctggaagcttccacggtgatcactttatttgtgcggtttcattgtggctgtgctgctgtttgagttgggctgtttgctgttctggtcacggayttctatgtgctcatgagacaaatttctgtatcttcctgtaaacacagttctgcacattccagaaaacctgatacatttctttggtcccaccttaatgtgaatcaatgtctctgcccttttactggcagtcagttatcccaatctatataccgttccatcatctactctgttcgttgttttttttttttcccttaaaaacatcaccctgtcagaatgtgtactctgttgcagcaaaaatcaattatacatatygatcagaacttgtcagcagatcctttgaaggtttacaacacaccgttttgttctgccatactagtcgggaagctgtggccaactcctgtagagtgagggtgatgggtgagtgggtgggtggatgagtaaatgaacaaagaatgaactagtattaagaagaaaatccaaagagattatggtaggctgagtgatggcccccaagtatgtccatgtcctaattcctggtacctgtgaatgttaccttatgtggcaaaagggactttgcagatgtgatcaggttaagaatcttaagatggggaagttatcctggataaagtgggtgggtgcagggtagtcatagtgtctttgtaagaagaggaaggcaggaggaaggtcagaatcagagagcaggccatgtgacaacagaggcggaaactggaggatgcactttggagatgagggaaagaactacaaaccaaggagtataggcagccactagaagctggaaaagatggaaatccattcttccttccgaatctctagaaagaatcagcctgccaacaacttgactttagctcagtgaaactgattttgtacttctggcttccagaactgtaagataatatatttgtattatttttaaccactcagtttgtgataacttgttacagcagcaatcaaaaatgaatgcagagagtcagaaacttttaaaaggtgaattaatgagtattgaagtcaaactggactatacgattctgctgactcggagtcaagttctctgtccatcacatcacatgatcaggatgtcagtcattgtggtcttgacccctctgatgaggtttacttgttgtgacaaggcccaaaggaagagggatttgggtagaatttgcttgacctatttctgtgtttttgtaagtttttgttttgttctgttttgtttttaaacaactggtttctttctgtgaaggaacatttattttttcaccccccagatgcctttctttgcaacttttgctgtcatttcatttggttgatttctrtttcactcttgattcagtgttgtttctttcacaataagataaataaaatgatcagaaatcgagcaagactttccttttgttagttctttcttttgatgtccaaagaaaaaggcaagcagttactgtaatttttgctccttaatgtgatttttttcttggtgcttattttcaaacattttaatgtccagaaaagccctacattgctttatcactgcattataccatgatgtgttcagggttttttgtttttgcttttgtttaagatgcccagaatggggcggggcatggtggctcatgcctgtaatcccagcactttgggaggccgaggcaggtggatcacttgaggtgaggggtttgagaccagcctggccaacatggcaaaaccccgtttctaccaaaaaatataaaaattgtctgggtgtggtgacatgcacctgtagtcccagctactagggaggctaaggcaggagaattacttgaacctaggaggtggaggttgcagtgagcaaagactgcaccactgtactacagcctcagcaacagagtgagaccctgtctcaaaataaaaaaaaaaaaaaagaagaaaaacttgcycagaatggaattttgaactagtacttcccagtactagagttctgtagcaactgtgaagctttgacagtctctcctacttgttgtcatgttggcacactgatttgttaatggggaaaatattatatatatatatatatacacacacacacacacacatatataattacatattatatgattatataatgatatatataattatatataatgatatatgtatatatatttccaatatattagcatcacttttgtgaggatccacccaacacaaactgcatgttagtagctttgctgtagttaactactgaaatattttatgagatctgggggtgaatagtaagcagtggaaaaatgtgatgagcatcagaggaattctaatagaccatttggtaaagggattgttttattttactgcttttttcatttatcaattacaaagataacaattgtcagtccaggatgaatagaatcatcaggaaaatttagttatatatgcacttgttatagggattgattttcaaaagttcttaagtagattttattttgtgggtgttcatacataactacaagaaaaaaaaggaatatgaactaatataagccatttgaatttttaaaaatataatgttgagtaacagtttgaacctaagaatgtaagaatacattattcacttaaaatgacacccttctgggccaatatactttcctgtaaagtttctttttattagattactgtatagctatggttaacacattttattgtgaataaggatcatttggaattacttaataaaatcctagttcttgggtcccttgttccagagattttatttcaatcgattaggaaaggactacaggatcgctctatttaacaagctctgcaggtaatccaaagtcctcagaccacactacattgctgtgtataatccatcagtaatcaaaatattgagtgtgtgctatgaaattattttaagaaattccttaaagtcttttcaagtcttttcagaaaagtagttgttggaaccatggtttgccatatgtaaaatatgctgtgctaagttacagaacagttttgaaaaagacttaatctgttttgagtgagcctgtggcagttgtaacattctggatttcattcaaatttgtagcaatgcaaatggcatgctttagatgtggctgtaatgcatttagctcaatgacaaggaaactggcagatatttccataagacatactgattgagaaatagtgcttgctgctagtggcttgatctgcatacatttaggatttaatagtttgcattttttgcttactcacttgtcctaaatgcttaatgaataggctctaaggctttaattttcaacctatcctaagttkattactaaagtttatcaagcaataaacacactattgcacttatactgtcatgtttttataaagcagtttataaaaggtgacatctggcaaagaggcagatctataaaaatcatgctggtggatgtagtgtcattttttctgccatacacccagaaagagtaatattattttgacacacacatacatccccactgtcaagtttctatttttatagttagcttactgcatgtatccttaagctatacaaaacctttgggctaatgcaaaaagtgacatttctgcatatttattacaatgctattttagaggttgactttgcctgataggatttttccaagaacaatgtcatgttcatgacagtagacatcattgagaacaatactattgtgtagttagtcaggaaaggtcaatatggaaggacaaatcataaattgcttaatttaatgcagcatgattttgcctcaatatttgctagttataggggagaaaacaatgataacgtggcccagatgagcaattctttgagtagttggaatatgaactaatactttaccaaatgagtgcactgccctgcgatccagcaactttacttctaggtatatacccaagagaaatgagtgcatttgtccaccaggaagatgtatgagaatgttcataacagctttattcataaaagccccaaactggaagcaaccaaatatccatcagcagcagcagaatggataattgtagtatacttacaaaatgcaacacttcagagcaatgaaaacataccatctactgccctgtgcagcagcagtgatgaatttcacagatagtatgttgaacggaagaagctggatgctagagcgtaccttctatgtgatttcctacacatgaaattcaagaactgacaaaacttgtctatcataatagaagctaggatactggtttcttatttgtgtgggggtaggatggggatgtttattgagggaaatgtctgggtagggtcagagagaggcttctggaaacatgtcttatgacctaggtggtggttactcgtgtgtatacatatgcaaaagagcagagctatacacttaagattagccyattttattgtatgttctggctatctgttgctgtgtaacaaactactccataacacaatagctgaagacaatttattattattatgtctcccaaggttgtgggtgagagattcccacagggcattaggatgaatagcttactgcagttcattaatgtctggagcctcagctgggatgactcagatagctggaggttgggtgggcatctttccctttctctcgccacatgctgtcttgggcttcctcataatatggtagcctcagggtggcagacttcttatcttagagcaattcaggatttgaaagctagtgtttgaagagaaatgccagtttcttgaggcctgggcatagtaagttctgctgaattcttttattattattattttaaattttaaaatagagacaggctctcactgtgttgcccaggctattcttgaacttgggactcgagtgatcctgctgcattggcctcctaaagtgctgggattacaggcatgagccaccgcacccagcctctgctgaattctcttagtgaaaatactcagtggccccaccttactcagggagaaggaacatagacccctcacttctggatggaaggaatgttaaagattttgtggccatttttattctgccacaccatatgttgctatatctcagttagaaagtttttaacagttcagatcaacctcattactctcaaaactttcttccttatgggtagggagccttttgtaaaatgtgagtctagttctgaaaaacaaacaacaaaagaaaccctccatttgaaatcatagtttctgtcacatcatacttctcttctcagtttccttttgaggtgaaaaattatgattttttcttattttatttgaagtttctgggctttgagttttattttatccaggctcgggtgaacttagacttttatttaatcattcacggcctacagttaactgtcagattgaagccagataaggcttctgatactactgaaatcccttactccttttgatttatgggtaatgaatttgccctctgtagtcagagcatgattttttttaaaagaaatcctatatctcttattaatcatctaccagaaatatgttgcccaacaggcctctttgtaaagatctgtattaagacacaagagcaggacagctgcatttacgcagcaagactttatatgagattgaagggaaatgtttatgcaagctaaataaagccagtgtgaaagcgagccttttaaactattcggcttcatttgaacatgacactgatgtagacagcttgggaaagcaatgtgtgcacacaaaatctgcattatccaacatatcaaaagatttcaacgccagtgcaccaacagtctctagcagagataattattgcacccttgcctggcctcatttgggccaagagcagcacttgagcctgatctttaaacaacattgtacatctcatttgaagacttttctggggccatctctcaattttgtgccagtaacttcaaagtccgtttgcacagagtcaagattagaaagatctaacctcatcctctcagattttcttttttaattaattgcaaaatgctatgcttttgctccccccgggaagcctgaaaggatttatgcagtcatttcatatcaccatattttcaagactcagctatcatttgtcacttaaaaagctttgtggaatataaagccatcaacccagcaccacagcagtatcactttgtcaaaagagagttgtttgcactttacgtgacaacctatttgtataaagtgmcagggtttgaactaaatataccacatgaaatctaagttataggtgatggaatcttgtttgtagctctagtcgttwkcctgctcacactcctcccctgccagcctgctcactcagcccctgtattctgctaatgtgactgttttcaagagatccctttaatgtagacaatataaatgcggttgcttgacctacttgagaaggcacctaattttagagaactgggtttttacatattagtttcctcttgtgatccctgactcctgaatattgtagagtgtttataaaagtgtatgccaaggtgctaatgcacgtatctaaatatgtatttatatcatatgtaatgtttagagcatgtgcataggtgtgtggataacatacatctgtgagtcagtgagtatgataggagtatggccttaggaattaattggctggatgctaatctgtgtccctccactctcaagcaagatgaccttggagaaaataaactaatttgggtctgtttcttcatctgtaatctgggggaaatcatatcaacctgaatcaactgggttatggatgcactcggtctcatgcgtgtcattgtgaacaccagtaaataccagcgctcttattaccatcacaattagcacattttctctgtagtgaattgaggtgattctttgtggaaggttttgttttgttatttttaaacattttcaagaattagttgttcctattcaaattgttagcaaaaaaattgtgtgtgtgtatatacgtatgtatatacatagtacctacttcagggaggcgttgttaaaaataaagtaggtcctccctcagatgcagtgttttttaatcatacttctcaaaggtagttgataggctggcaggagcagcttagatctcccctaggaacctattggaaatgcagaatctcaggtccataccagaactgttaaatcagaagctgcatttcaacctttatttgttttcacactaaactttgcaaaaacactttcctggtagaatgaccactggttttgggttagttctaatggagttctttaaaggattttaaccacagaattcagtaagaaatacattttgtggctgggtgaggtggctcatggctawggtcctggcactttggggggccaaggcaaggaggatcacttgygctcaggagttcgagaccagcctaggcaacatagtgagaccttgtctgtacaaaaaaattttwaaaaaaaatcagccaggcatgatggtgtatgcctataattctagttactcaggaggctaaggcaggaggattgcttgagcccaggtgtttgaggttatagtgagctatgaccatgccactgcactccagcctgggctacccccatcttaaaaaaaagatttttttatcccattagtacaggagagcatctatactcctacacatatataattaaaggtttcaccaaacagtgtttacccttgctgtatgctaagtactcagatttttttaaaaattgtatttcagtttaaaacaygctggtcacggcccactaaattgattttataattcagtttataaagaactattatactgtattaccttaggcaagtcgtttttttcttccttaggtcttgattttctcaactgtaaaaatgtgtgggttggactaattgatttcaaatatctgttagcttgaacagccctgagatgctctatgaaatgtgaaagtccaccccgaccatgtttaagaaaagggcatgtttattggttgttgtatgtgtcattttattgagagggcctgaaggagcccatacaaatgatagctcacaaaccacagcctttgcataataaaagcttatagctcagaatggtagacaacacagagtgagcaattatgcrttggtcctaatgtgtcattattttagacaaacaaaatacaactgtaagcttttataaatgtgcgtactttgttagtgtataactaaaatataatgagctagattctttgcctgcctaatatacactcagaatattaagcagtcttgtgtttggaaaaacacagtagccatatagtgaagaaaccagacaacatcttgacctgtgatcagaattcacatcaccattcatgagcaaagagatatgtgtgtgtctcctgatgcagtaccctgagaagcataaccaatatggtacttgggtccagaatatacaacctgaatctaaactcaaggacacagcagagaacccccaaatgaggaatagttctatttaaacaaaatgaaacacacacacacacacacacgttggggtagaggggtttggggcatggaggtgtactgttaaaaaagaaaacagaaagacaaagtaatgtttgaggttaaaggagacttaagagttaggaacactaaataagatcctatactggattttatattaaagaggggaagatgccaaaagggatgacgttgggttaattgacaaaattgagaaacagaagacagtggactggatataatattgtaccaatgctccatttactgaaattagtaactgtactggggtggaaaagaatatctttagttttagttttaagaagtatgcgctaaatgcaatttattttcaaaggaagcaggaaaaaatagtgtgtatacagagagaaagcaagcaagaaagtgcacaaatgataggcagatggggaaaaatataataaccagtgaatctggggcatacacagttgtcccctgtactcatctaattcttggaccatgtagataagtttgaaataaatttcaaaataatttcaattacaaatttcatttgtaaatgagccctttgtttyctttctttcctctaatctgtgtccttgtgtgtttcaggaatacgtagagtgcttttgtcttgggggttgtgccttttaaggccaggttaggttggactggaggctccagttttccccagtagctgttagctctctcagaagccaactggagaggcttggactggtcacctcctgcacctgtgcctttttggtctgttcctcttttatcagtactgacccctaggcctagggtgggggaaatttatcattgattgtctgtctcctttgcttctgttggtctttctcacttggccttaggcttttcttgacctccacccaattcttgttctacttcttgccccaggtaactaaacccttattcttttcagcaccagtttctttaagagagcaccattcccttttgaccttgaagaacacctagcatcccttgaaaaacaccacagaacagagaggcagatgtcaacagatgtttggacatactggtgggtcaaaagccttcaaataacaggtcatgggctctgtggagacctgaaatccatgaaatccattttggtttttctttcagctttgacttgcctttcccacggcagagaaatgtgggagaagtaaataaaggttgcctttgtttacttgctttcttgcctgcctgctctgcctgcatgacctgattccagacagcaggcaggtgctcagtaattgttaattaccctgtgaagacgtgtccttgtcctcaaggagctacagtcttatgaaatgagacactcgaatgtgaagtggactgaaagcacgtgtgattaagtatattttaaaaattatagtaagtaatatgtagtgagaatctagggaacccagagaccattgtggctgtgggagcgacttgagctgatagaggaagttggagagctgcgaggatgtatccccaggatctatataaaaagccaccacrtggttctatattgaaaaaaaaagttaaacaggaaaggaagcaagcaactatggtataggatctcagatggtttgcagaagaatctgacctcagagtctgttggcttactgaggagaggaagctcaaacccttggatctcagggtttcacaaaaagcctcaatttggagtttatatattatttccagtagaaggaatgcacagaaaatctttaatagaaggtaaaaagtcctctgtcacaccacttgagtatttccttgctatgcttttggcttaaacaaaaagttttgtcgtcatcttgggactgtcataatcattctgcagtgtattttttttagtgttcaaagtagcctatgttaaaatggaccatactttttggaccactggtttgaggtttttttcttttaatataccaaagtgtcagaagtggaaatgggggtctcttgtcctcccagagcctctaaccatccccacccacccttgtaataaggtttttacacagcactttatgtatttggtgaggtggattttcccctctcccaaacacctccctcaacccccaagataaatggttccaaaccttccgctgcaagcagagctggtgtttagtttattggtaattaattgctagcacttccctgacagaacataatggaactacagagcaatcacttagaaagggaaacaactgtcaattatcactctaatgaatcctgtttaccagaggtgacggcactaaggctccaagcagcctagaaagtggatatcttaaaaactccattttcgtactgggtgtgtgatgtgtgagataatcactctctaggccagattttaaagtggccccagctgtggataacagtatataatttcagagctattctcacagttagtgattaaatactctctgtttgtatttgaatatgagtaaatagaaacaaccattcctcacattaaaagttttaaatagtatacttttggtgatcagttatagagatgattataggagtgatgtgatagatgacatttagtgaatcatcggtaacccaggtcctatgctgaacatttcatatgcattatctcaattcttaaaacaatgttgtgttcagacagttggcagaaaggcaaattcatgctctcatgcaaatataaaatgaacacatcaagattttgttcagctcactaattgttggggggggacccaatgtaacgttaaagtcagtccaaagagcatttgagaggcatatatatatatatatatatatatatatatacacatacacctatacctatacctatacgtgcaatttggtagagtgttgggttagatacagaaaggatgatgtcctcctggtctgtaacagcccatactaattattccctctcctgagagttgtcagttaaccctgtaaacagaaagtcaggcccaatagtgggaactctacactgaaggaatgcagtaagctcaatcgcctctttccaagtttgagatgacttttctgtaaggcaagtaatactgtcatccatatgtgacaaatgaagaaactgaggctttgtgaggttaagtaacttggccaaggttatagtaaaggtggagctgagactgactgaagtctgactccttatatgggtgacttgagcttaataaatgcatggatttatcaagttcaactcccaagattgctgctgtgcagcacgattactgtccgttgttttcctcttatctgcgaagtagtgttgctgatagtacttacctccaaatgacattatgaggattcagtgagtcarcacataaggcactgtgcacagtgctcactgcatagtgatcccttggtaaatgttggctactgtcagcatcattagcaacaattatcacagtacacgtgtgtgccgaaccacatgtgtctcaaaaagagcagtgtcctcaccttctctaccttggccatggttgccttgagrgtctgggcacagacagcatctgagctccagggatcatcatagtagggaamcagctctctcccagtgtttgtccagggtcaacactggcttcagctgaccccaggaatagactggtctcttagtatttgagaaaatacctcttttcctgggaacaaaacaacaatgcaatgtagctcataaaatatttgcccttgctgttttatgacctgtgagacatcaaggatatacagatccatgatatttgtagcaggtgtcattttttaaaacacactcaaagtaaatatcattgtcaaacaacacactgaagattttatttgatggtaaaaactcaagcatggcattcaatccttcttccagttcatattcccctgtatcagtgagaatggattttaaaagttcaagacttgtgtggatattatctcactgtcttccttcgggcagatgaagtattacagacatttctttgaatcttgtctattggaattagggagtgctgaactatagaaatcaaaggtcaaatgacaagatggtgtgtggcaggygaatttrctgacttttctgttaagacttctctgtagatgttaagaaagtttgaagtttttgaggagatgttttactggagacagagtsctgtactgcctcctcctctgtgagatgagagccttattgcagtcagcgtgtctgcatttagctgcccagttgtgtccataattttatgttctcagttttgttgtgtggggaagaaagagatagtcatgtcaaaagggggcatggtttcttaatgtggaagtctaaagaatacacagaaataactacctctgccttcacaggatttctgtcagatttttgcctaattataaaagaagtgcagcatagaggtcttattactgtggctaagatgaaggaaaacactctcacgatcaatcctccatgattttrttattattgataattcaaacgatatgactgtactctttgagcactgacgagcaccaagtgtatttttaaacatgccaagtgtgattagtactccttctacacattcccttaaatttgtaaaatcatgtaatgtgtttgttttttattttatatttagaattattgccttgtaaactctcttgccatactgcaagcagtgcaaagagacccattttaattttgcacgtgtattgtcaagaatcattatgaagatctacaagtaagggttgaacagttgttcctgatggaaatgamgcagacagaaagaaaaaggaattgaggagcctctcagtctaaaaacaggcatataagtgatatcttagtaattcrtgtcagaatgccccaaaatctgttttacgttttctttgcttcatggaaaggctacagactgggttaagtatttttgcagagatttctattccacatagccttgactccttcaaagcaaatttgttttctcttttacctttagtttcctcaaacaaattgggactaaagtcaccagtgaaataatgcgggatgtattgacttaggggagatatgtttttaattttaacttcttgggaagttgagttgacgtaaatcctctttaccatagtctgctgagttttgcgtactctagttctaatcaaaagtcagacaaagtcaaaagaatctggagttaataaaattctcctatttgttttccttcrcaacagtgatatgtcttagacttttacgctttaatacccctcatgaagacataccacagtactacatgtaggctagctttagaaaatcttggaattatggtttaaattgtatagtcattaactgacagaatttgcttttctaaaatacaacttttaaaattagttgttgtgacctttataaacattaagaattaaggtagaatgtaagtgatgcagtctcattaaatttaatcaagttcaataaaaattccaaattcaaaaaccgtcttcataaaactgtgcgttatcaccaaaccattaaatagcacatcagtttaaaatwattaaaaattgctaagtatccatttagcatgagatacgtgttatgactgcagacacctycaaaacaaatcgacagtctattgcactgcattctgagaatgtaaaagcaccattacttactgttaatggtacttctctaatgtatgtaaatacctcatctgtacccaagctcttggcagttatttcttacttcttcctagacagtttaaagatcttaatttattaatattcacaacaagtagaaagataaacacattgttttgaagcccttgatggatggagattggagatgcacagtgtttgggttgaatcaacagccgagagtagatattaacttgttggcagtaactcatggccctgcatgaaacagaacctggaagagagaagaagaatttaaaatgctgttattgagaatctctggaagtayattattccaaggtaccttagattttaaaatttggcctcaccctacacctattttatgatttgtccccactacatcaaactcagtgtatgctcttgccatggtaagcattttttattcactttactggaaatgattgacaaggacttcttcaggatacattgggagagcagtgtttcctatttattatgtcctttcatctctgcctgacctagaatattcatgcttctgtcttaacaggtcccatgttataaaagtttaaaaaaaaagaacaaaaaggaatattctgtgttttcttgcaaaccccagcccccaatccaaacaaagtgaatggcttacagacacgagtggtaggattttcaccaatttagatataaaatgtgacaacggacagaatctacattcaatrtctgtatccttctcaattgccacagactgggtagtaggaaagcaaaagcaaatttttgtagtaaaaatcttcttggcattttatttttatagtagattagattcagagattttaataaaaacttgtctttaactttgtttgatagagatgtacaatcagcttagcttggttgcttaataaagttagatactgagaattgatgaaattttaaatccagcttctaatttagagttcccagagttagcaaataggagtacagggacccagctgaatttgaatttcagataaatgtaaaaaacagtttagaataagtatgtcccatgcaatatatggcacatatactaaaactgttttattatttatctaaagaytaactgcttatcctatgttttatctaaaaactctattttatgatgataaaagataagtgctttttgtaagcatgtaaactcacacacttgtctcatctgtaaaataggagtaaatgtggccatgacctctaaggttgttgggaggattaaattcattgataccagtaaagctcatagastgtttcctggcatctagtaagcaatgtgaaagtataagcttttgttcctgaggtgtggtggtcatttgctccaataagccaatacatttgctccttttctcctggtasagatctgctaaaagtaaaggaatctttctgatgcaattggcagcaattgttgatttacttgccaaaatgtaggctaacccaagtgaccccttgactgaaatacttaaaaatgtaatgtgctagtgtgttcacaggcatttaaaagagccacagaaattgtaatgtttcattttgcttttcaaagggatacttaataaatgtattagtgtgatatatcaggcatgctctagaacatctgtgtgtctacgtaaagaaggagagaaggaataaaggagacaagcaagagccaaggtgcaggtcacaattagtagtcatcaaaatgaaagcaagctgtgcaagggtacaagaattcccatctcattggagggaaatgcatcatgatgttgtgggtgtcttaaatgtaagaggaaccagtgttccttactattaatctgtaatcctctaagtgctgggcactcctgtctccagtccctcatctgagagctgtgtgtagaagtcagagtgggttgggttataatgcaataacaaacaatatgaaaatcacagtggcttaaccaactgggagtatttctcatccttgcaaagcctgcggaggttctaggtgatgctccaggacagctcacctccaaggggtggctcagcacgattgtctactgctgtcttatggcacctttatctcaaggcttcagggatgagaagcatagaaaatcacatatgggctgtgaagcggcacacatcaacactgatcacagcctgtgggacagaactggtcatgtggccctgtccagctgcactgaaggctctggaaatggtcttccatgggtccagcaacgggagagggctcagattcattagtgaatgctgctttgccatactggtaaatgttgctgatagactgtgttactctcctccacaaagtccaygagcaacttcaaaattctttactgtgtcacaggcagyatttggcaatcaaactggcaagagagctgaaacccattagccttatctgagaacgaaaacacattagccgtcctgcagtcttcttctaaaccagtgaaaatgcctatgacaataggaatttggatgtcatgcttagtgaattgtattttagaggtgaaaagaaatagtttcttctgatagcctctgtcacaggcttgcatatcaatttgaattcaccattacttcagggtgtgtttgatgtgggagaaagtggtttccaggtttggcagttgtcagtctcgatgacaatatttttaaaatgtacctccaatttgtctgaaatttacatccttcctagctttattcccatgcaacaaaaatattaaaggtttttcataactgtgacgaacaggggagaaacttattaacaaagctttcaataaaagttgaaaattgattttgatcctggtgtaaggctgatggcatcaaagctttttacagctcaaggcagtcttgtctaagataccttaaagtgatgcttgatgagaaatttagatcagcccccatttgagcctagccatttcagtccagttttcaattagatggaattttctggtgagtgacactttctaccaattaactttgataaaggagctcagcctcagaatattctcaaatcaggtatatgtgttagacgtcagtgaaatatgattgttggaagactggggaatacgaaagacaacctttgaaatgggaagtcacatttcaaagttctgcaaagtagttgcttatactaatcaaccatatttgttttttcttttaaatagttatttagttccaagcaatgtcctaggcactgtgatgatcactaaattgcattagaggcattttctaaaaataaaaagtgagatgtggaggaagaaaagaaatatggtaaaacatagaatcaagtatttagttgtctttttcgggataaatgtcagaggccctaagataggagaaattatgcagggttggagtaggcctgttgtaggaggtaaaagatctgtgaatattctgttgattaaatatgccaggaggagagaaagggagaagggcatcccacactgaagatataaacatttagtcagaagctgcatttcttgccttaccaataaaaaccaagctttccttgaactcttagagataaaaatttaaaaaaagaatgaccaatatcttcaaaaaggaaaacataaaaacagcatcatttaattcccacagcatattgattcaaagtggscttcagttaaatttctaattggaacctcctgatacttctttttaaaaagcaattaaagtagaggcaaaaatattagtctgacattgaatcataaccactttaawtatatttagtcaatatgggtatttaatcatctcccgagagcaaacttttttttccttttataaggttactcttacagtttttaattgacaggatgtatatttagcatttaatgtgtgtttttaaaatttctgaggaaatgtatgagtgcatttttattgtttgaacttcagtccttacagaaaaataagagtaatctgtgcttctacaccctgctccctactctgtagtccttctcctctaactagaagtaatattagtaactgttaaaattaggtgtaaaattttcaatgtttatcctaatcacttattttgctaaaacccgttaaagagtatcagaacaatttttagattctaagkcatgttatgagcttgctgttgcaaaggtgaaccaacaccagggaaactggggggtatgtcaaaaggaactggagaagggtaggagaaggttttgggagctagaactagccatgaaatggtcctagtagatctgggtcagaattgatcaactaggcagtttctagaacagagtttatgtgtatgggttgagcacatgaggctgaatgagtttgtgataragaagtttaggtttagtcagtaattatagcttggcgagatacagtgtacttgtttcatgagtcataatgcagatttgcaagttatggctgatgttttcattctttagtaatacgtacataaggctatggtgaaacacactatctctagtttatatgtccagcttttcccttgaccttatgaagcaatgccaatatgacatgtcacataattattttcctattatgaaatattatttacytgttgactataaaggtattaaagtgttttaaaatcatactttcaggtcaaaattttattttaggataaataagagaaaaccgtttcagttttttaaataaatgaacagataagtctcctgagaaacgggaagcccaaatgggaactctagggatccgggggaatctagaatggactcgggagagatgctttgggtgcttgaaagatgatctagctgctttttagagatgagtttggaagcagggaaacttgggagatgactattacagtacaggtaaaagagaatgggggctggatctagggctgatggagtgaagcagatggatctgagagctatctggaaggagaacatcaggactgtgatattcttattttgactggtggggaatagggggagtcagaggtatccaaaatgcctcccatatttctagtttgtgcacatggatcaatagttgctggatcaatgctgaaacacaggacaaactggaaacaactgggttttgttggagcaagtgggaagtaggcagggagtttatcatcggagtgcaataacatgccctttatttatatcttgactgaaaattgacaaagcaccatcccatttcctatctcatcttatacgaccacaactgtggaagggcacctcggtgatatcatccccatcttacaggaaaaaacaaaacaaaacaaaatatggggctgcctgaatatttaagtgatatttagagatgcaaggctagtagctgaccatctttccattagaacttgagtcttttgactctaatcctccccactttgtaacccttccttttttcttctcaagtaaagctgtgaatattctcttactatccctcagttacactttttttggtcttaatttctcttctttgataggatctgttgtgataacagtcaagagaaagattttagtttttttgaaaaagtaaaacaaggggactttcacttctaggaaaaaggtgtactttttcctcttcctctcatttaggacaagtaaaaaatcctgaatattgtatataagacaaaactaaaaatattctgagaggtggagagaagtcagatcagctagagacctggagacacaagaaacaatatggtagtgaattccctagacgttgtttttgccttagctatcccagccctggaactaaagaagctagtaacccttagctgacagagggcacagacaaaaggaaaggttacagcgaaagcctgctcactgtaggtgaaggactgggaaaggggcagtctagcartatagagaaaatttttagataatatctgtactactccagctaaacaccacacatacacacattgaaaaacgtgtggcctacctactcctacctccaacagcaaaggccaagtgggagccaaaactwctatcgtcactgggatgtaatgagccactccagcctccttgtcaggttggtattacagaaagccaagtagagagccagaattctcatatccagtgggtggtaacgagtccacatggggagcctggattttcacctctaccaacagtagagaagtaccttttcctccactcaggggtgataccagaagaggcattatagacaattaggactttctcccctgcccagtagtaataaagccaatgtttcccaggcaggcaaaagtggcatcatattttttccatactgaaagaaaataactgtcaacttagaattctatgtctagtgaaaatgtctttcaaatatgaaagggaaatcaagacactctcagatgaaggaagaatattcatttattttttaatttttgaagttgtattgccccaaatgaaaatagtaggaaaaaccctgcagaccaacatccttcatagacagagatgtcaaaatttcttaacaaaatgttagcaaattgaattcagcaatgtataaagagaagtatacatcatgatcaagtagggtttatttgaaaatcagcaatggaatctaccgcatgtcaaccgtaaataatgaggttcaaagaatacgattaaatgtggagtttatcctagtgcagarcttgaggatcgtcacggctgactctacacaaatggatcagcagcccaatttggtgctgttgaggtttcatttacataggcagggacagagaagttccagcaggattacaacattttccatgcaagaccagtgcacatgccacagtaatttgattggttatggattgctacattcaaaggaagattactttattactctgtgagaaagggtaatgatctgagggggtcctgtccctggcactgcttggtcttcttaattatttacaagaaaaaagccagaagttgcagctgcatgccacttgactcaggctgcagagccacctctcaaggttcagaatgatttaaagctctaacagctttaagttgacttattttaagtttaaattatctaatttcatacacattagcaggctaagaaagaaaaatgacatgatcatatcaattcccacagaaaaagcatgtggtgaaatttaataccactttgtgataaaaacagaacactataaaaggaagagaatgttttcaaattgataaagaatatctgcaaaaargtaacatacttaacrttgaaagactgaatgcttttctttacggttgggaaaaagtcaaagatggtgactctcaccgctactattcaacacagtgttggaagatcgaatacttttgtgatattttgatataataaacatatttggcctctgcccctggttccgggtgcacaattcctaaaacttgtgaaatctctggagataagagtgttttttaatgctaatatgataactggtggctggggcccctagatagcctcagaatggggactggttgctaggagaaccaactatgtggtataagcatcagaactttgagccttatctcctgactctagggaggggagagggtctgaaggtctggatgatcatcagtagccaatgctgtaatcaatcatgcataagaaatgaagcttcataaacacctgaaaaggacaggatttggagaccttccagcttacagaacgtgtgatgatgcctggagggtggtgctcgtagagagggcaccttcccagagagggaaggtctacactccttcccacataccttgtcctctccatctcttccatctggttgtatatctgcataagtaaagcatttccctgagtcctgtgagccactctaccaaatttcttgaacatgaagaggaggttgtaggaatcctgatttatagctggccagtcagaaccacacttcacagcctggggtacacaactgacatccaaagtgggagctgtcttgtgggactgaacccctaacctgttggatctgacaatatctctgggtagataatgtgtgaactgaattgaattctaggatacccagttagcgtctgttggagaatctggtgtgagaagtgttgagtagtgtgtgagagtaggaaaacactttrgtattttatgccccctasgcaagttctgatacttttaatactttcattattgatcttgccagcacagtgagccaaggaaaggaaataaaagacatacagattagaaaggaagcagtaaaactagccttttttttgcaggtgacttccttgtaagtcatacctagaaaagtctaaggaatctttttaaaaaatcctagaaataatagatgagttcagaaaggccccaggatattagaccagcatatagaaaccaactatgtttatttatattagcaatcaacagatagataccaaataaaaaatacagcaccttttacacacacacaaaaataaatacatgaaaatctatcaaaaaatgtatagaatttgtatggtgaaaactacagaatgctgatgagagaaagcaaagatgatctcaataaatggagagacatattctcacaggttagaagattcatcatagtaaatatgtcagttctcccaagttgatacagagttttaatataattcttatgaaaatatcagcaacaatttttagtagatrtagacaagattatcctgaaattcatatgtaaaggcacaggaactagaatagctaaaacagatttgaaaaagaataaggtggtaggaattagtctatcatccagtttcaagacttacatacttgtaatatttatatgaccatgtgtcattgacagaagtatagacacatagataaatgcaacagaatagagaacccagaaacagacctacacaaatatgcccactggtctttttttttttttttttgcaaaaataaaaaagcaattcagttagagaaagaatagacttttcaacaaattgtacagttaggaaaaaaaattaacctatacctcacaccttgcacaaaattcattcaaaatgtctcatgaacattaatgtaacacttttagaaaataaaacttttagaaactagcagaggaaaaagtcattgggatctatgtctaggcaaagggttcttggacttggcatcaaatgcatgagccataaaaggaaaaattgattagtttaacttcaaaatttaaaaattttctctctgaaagactctgctaagaggctaaaaagacaagctgcagactgggagtaaatatttgaaaaccacatatccaaaacagggctattatctaacatttataatgaactcgcaaaactcaacaacaacaaaaaagacaaaccatttggaaaatgggcaaaagacatggacagccatttaactgataaacacacaaaaagatgttctacatcattaactctaaggaaaatgctaaataaaaccacgttgagatatcgctgcacatctatgagagtgacaagtggtgacaacactaaatgctggtgaagatgcggggaaaatgattcctttcgtgttgatttttattcaagttgtgaggtttatgtgaaagttcttcttgcttccctgttcctcctcttctttcccctcctccttccccccttcccctctatattagtccatttcacactgctgataagaacataccgaagattggtaatttataaagaaaaagaggtttaatggactcacagttccacgtggctggggaggccacacaatcatggcagaaggtgaaaggcacatcttacatgaaaggaggtgagaaagaatgagccaagcgaaaggggaaactccttataaaaccatcagatcttgtgagacttcttcactatcacaagaacagtatgagggaaactacccccgtgatttaattatctcccacctggtccctcccacaacacgtgggaatcatgggagctacaattcaagatgagatttgggtggggacacagccaaaccatatcaccctccttcctatgtatgcccagctgcsttagcaccatttgttggaaaagctatcctttctctattaaactgcttttgcatctttgctggtaagaatgtaaaatgatacagtcacgcttgatagacagtttagtagtttcttaaaaactaaacatataactgccttacaacctactacagtttgaatagcctccaatcctcacgtcaaaatttgatccccactgttagagatggggcctaatgggaggtgtttgggtcatggtggcagatccctcatgaatggcttagtgctgtccgggtagcaatgagcaacttctcactcttagttcctggagcatttccctgagagctggttgctcaaaaactacctggcacctttaccctctctcttgcttcctgtctcgccatgtatgtgatctctacatgctggctccccttctccttcagctatgagtgggagcttcctgaggttctcatcagaagcagatgttagcatcatgctgcttgtaaaccctgcagaaccgtgagccaaataaaccwtttttctttgtaagttacccagtttcaggtcttcctttatatctattttttaagagatttctttttctgtgttgcccagggtggagtgcagtggctattcacaggtgtaatcatagcccactgtagcctcaaactcctgggctcaacagatcttttcacctcagcyttctgagtagctgggactacaggcctgtgccactgacctggctactcatgtattcctttatagcgacacaagcggactgagacaacccagcatttgtgatcatggtcatttatccaagaaacacaaaaacttrgatccacacaaaaaccgttacacaaatgttcctagcagctttattcataatggccaaaaactagaagcaatccagatgtccttctgcaggtgaatagttaaatgaactgtggtacatccataccacggaggctattctgcattcagatgaactattgatacatacagcttaatctccagagaacttcactgagcgtaaaaagccartttcaaaaggttatatgttgtatgattccatttatataacatccttaaaatgacaaaagtatagaaatggagaacagatgagtggttggcagtgattaaggatggttagaggagtgagggcgggagcaaattaatgtggccagaaaggggcaacatgagggacctttgtgcgaatggtaatgttctgtatggtgggggaaaaacacaggtaagtaatttaactgaggctgtaggtttacttttgtaattgttattttaggcacagcatgtggctgtactcaytgtttgtaaattcatgcctcttggtgtttagaaactaaaagtgtatataataaaattagatcagtattctggtgcaagttctgctgccagctaacttgtgaccttggtcacgttcttcatatttcctggaacctgggttcctctggagggctttcaaatgattcatctctgaggtcccttccagctgtagattttgatggtttcatgtttcagtgcatcaaatgcatttcaccatctcaraagtacrcttggrcatgcaagagtgaatctgttatgttatttatcttattccatcagatgtgctttgcgtggtctgttttaatgcatagaacttactggcatctcttttcaacaatgacagaagctatgaccccatattcactccctatgcttttttaagtcctgtagattccctcttcgacccctgaagacacagtgctgtgttgctcctggaaaaatgttgaaaaggactcataacaaatattgattcaaaatgaatttgtggttttagagaagaatatattgctgagattgctttttaaaatgtaatttgcagtaggtttacctcctagtgaattccatggcacctcctgaggcacagttctcattctaaactaatatattttttaagattttggtttacctcccataatgatgcatcctagctcaaaataggacttaattcatgtaaaacttgactggtataatttgaaagcccaatttctaaacttttaagtacattttgtgagcccttaaatttgccattcctctttatctaaagtggttttgtccagtgggcactgttgattttccctaaatcctcggagaggaaaagcctaagagctacactttctcaggatactttttatggcattaaacaagggaccgtttcattttcaattccaaccagcaggcatattttaggctctttccctatgccctataatactgtggaagaaagcatatagttaggtgaccttcagatctgtacctgacctccttccccattaagtgacatgaataaaacgttgtttgctggcagagaaggtcgataaagtatacgcttaatctccttccatggaaattagtgactttgaagccataactggaatatttttcctcttcttttcttgtttagcttctgtgyccttttttcttatattttctagcgtataaattctgtggtctttgacttgagatttttgggaaaagtgcaagtaagacatgagtaatctattactatgggcacagattccccaatggtcagaactggcaaagtcaaaatttctgttttcatyattaaaattaatgaccctatatcatatttaggctcctcttctttctcatagaaatgtaatcttgggaaagaaataataactataaaccaaggtgtatattatactatatttgaacatcatctctagattacgtatgttttcaaagacatttttatgctctgaaagctgtgggtttaatgtactatatgtattggcatcaggggaaccaaaatgaaatatcagtttgatttagtgttgctatggagaatgttttaatgtttcaattcaatagtttgtaatatatttaggcatgcttatacatrtatacttcagcagatttctagtttggtgaatgttttttaattgactatcaggatttaataatagccatttgaaataaagccaataaaacaaaaaaatacacatttcaatttcattttatgactaggctttctttaaaagagttgsacactttttttcttcatagaaagcttttcttgatgttttctgatatgtccactgatggcattcagctttcattctttgatttcctgtcttcgttagttggtgtctataattgcttgggtatgggatatcttggccggcaatttagttacatctaattatcaagtcacagatagaataatatggctgtttcacacagttttgttctgagtattatrtgctcttatcctggcttctaaggctttcttagagcaggactaactataaatatttggtkgtaaaagttaaagaaagaaaggaaaacctcaagagaaatggacggcagctaacatccaagttaggaggacacccctgattttctcaggcttttcaacttttatctggaaggggaaggggaactcccaacgtgttgaggatttgctcacagtatgctaatcctgagatgatatccgactacagtataatataggtcttggtttatattcaactatttcgaagcgtctcacaacagccttgctwaaaaaaagactttttaacacagtgggtttttaatattttgttttgaagrtgaaggtggttttctggtgattattgcagctggtgttctcattgctagtgatttccacctgggccctaccttgagctcaataacagttcacctggcaaggttggcgccacagcttcaagtggtggctctcacgtctagttgaatattagtatcactggtgttggtagtcattyctaagggctgctgtgccaaattatcacaaacttggtggcttaaaaatcaccggaatctatcmtctcacagttctggaggccaaaaatctgaaatcaagatatggrcagggccagactccatgggaagtcttcaggggagcatacttccttgcctcttcgagcttctagtggctcctgatattcctaggctgtggcactctggctccaatctttcctctctttccatgtgatcttttcctctgggtcactgtgcccaaatctcccagtcctttctctcataaagataccagtcattggatttaaggctcactctaaatatggataattttgacacaggaagtggaaagaaattatttaagcagatagtaagggtaaaagagttctcagcagaattttctttctaatgaaaagcatcccaagaaattatttttttcctaccaaagagcagcctgaaaaatcgagctgaaaacataaataagcaagctggaagcttgcacaggggaatgctggcagctgtgctaayagaaaagggctacctggggcccaggcatgtccgacatggaggctccatcttccctttttttgttgttaccatakgtacagtaaagaaacgggcaacatggcacagctcagatagaggacgtgacagcataataaaagattagggtggaggcgaccagaaatttgcatcctatgcaaatggcaaacctagtcctaaccggtttttcatgccctatacaaatggcacacctggtccaactagtctttcaccctatgtaaatcagactctgcctcctcaccaggtatctataaaaccccctgtatttccctgtggaccggcaacccatttttccagaacccctctccccagcagagagctattctctttctttggcctattaaacttccccatttaacctcactccttgtgtgtctgcagccttgatttcctcagctgtgagacaatgaacctgattatcatcccagacaatgaggccgctttagtctcatctggagatttttaattaattaatccacaaagatcctartatcaagtaaaagctaactcaaatcaggaagtgattttctcagtccagcctttggacttcactcctccagcccccatgagctgcctggatcagactgctaagactcaggagttcttggcacagccacctttgtgagccctcccaccccaagtcctctgtcttcccctctctgctattgtgtcagatctctgttaatttcagttatgccattttatctctagggaaatgagttccaacttccaaacaggcaaaacccaattcagtatttggaacaggactcatttggagacacagtgtaatgcagtgaatgaagcacaggctttggaactagaaaaaaatggtttcatattccttttctagacctttccttgataaggtctgagaccctacatgttttaacatctctgctgttggtgtcaatatcttattgtcaggattagagacattccacttccagattcactcacacggttgttggcaggactcagttcttctagggttgttgactgttggtctcagttctctgccacatgaggmtctccataggtcagcttgccttgtctcatcaagcaggaagagggcagagaaagggtgaaaaggatgaagtcacagtcatttataaacaaatcacatttctatttgttaaaaggaaataactaggtccagcccacattcaaagtgagagaagattacataagggtgtgaatagcaggaggtggtgggctkattaggagccattttagaagctgtcaagcacagtactctttcccaaaacccatcttattttttctgttggaatatctcctagcatttctagcttagggtatgtgctgacttctcggaacacagaggggcctggtgtcaaattggaatgctgaagcataagaggttaaaaagttggctttggaaagccacgcatagcatcagaaacagtattgtgataagaaccacaatcagctgagatcctggtgggtcattatatcgtgaattactttgctacatgattacacatgaactatagagcttcagaaataaaccactgtagtgggccaggagggaacaatatgaacagtcatttagaatgtgctgctgcagagagaataactaaatggcagttctttgaagccactttgctaaactatagtttgtatatctgctgtaatggttccgtgtaataaaccatagcagctacactctcattccttcttctaaatacccggttctgaaaccaccatttcaagaggatattcttgggagaacacggaacatcatttctaggcatttccatttctacataattagaatagaaagactttcaagtcagcttcaggttttagcttgttatataaataagttcacaggaatctcaaatgctttacagaaatctgacagcaactataaaaggcttttgaacatttttgttgccaaagtcctagggattgctggaatcttaaatagcccgttttaagctccaattcagaagctttttgtcatgtttaatamtgtggtgaataattccttttctgttagtcgtttcctcttttataatccacaaggatctttgagccatggaatggatattttctggagctataaattaaaggtcctttcgatcccaaacttaaaatggccttttaatgtagcacttctgtaaatccatttatctaggtctaaagattcattaaaatatgtttaaatgaaagtattatgtaggtatatgtccaatgaaatgagtgatcattttgaaatgagagaaccatggagaacagatgttcctgtgtacagtaggaaatttaataggaagaaaattatttgtagagaatattaaatactagaatggtcttcttattcttctttcctcctctttcttttaaagtaaattaagtttagtccagggtccggtgaaccccattgggtttgtggagagtgtttatgaaaactttaaacttggattaaaaaaatgatatcttcacttacactaacctctgagtagattttagcctttctttcaagtgtgaatataggcaaaagaccacggtggcattggcagtacttgtgactttctcaccaatagaaatcacagatactgtctaatcatatttcagttattatatgtatcccaaaacatttgtgcttatcattcctttgaagatatagttgttaaagcttccattgggtttcattgtataatgtcttaataaagaaacaaatattagtgtattacatatattttaaaatattttcatggctatgttctagtataatctgtattctcataatcctatgtacttttttttaaaagtatgatttttggaagttgtacacagacttcatcaggtggccaaatggacccaggcatgtgtgcgtgcacacacccacacccccctccacacacacacacacacacacacacacacacacacacactgtgccagaacctagaaaacagaatgattaaggaggtttgcaattcgtggagcaagtgctggaccacagtcactttgaatacatggtgtcatttaatctttccaccaacattgtgaggtagaagtcattattattctcattttatagatgctggatcagagactttgagggcacggtagccagccttccaggtggcttccagtgatccttaccttttaaaattctcctcctagtgacatctcctccyaccttgtattatgttayctctttgaccagtagaatacagtgaaagcaacagtgtgcgtcttcagagtctaggtcataaaatcttactcattttgggaaaagctagtcaccattttgtgagaacacttaaacagctttatggagagcttcctctagcaaggaataaagtttctttccaacagccagcgccaacttccagccttgtaagtgaacctgaggtggatgcttcagcttcagccaagtctgcagattattcccaacctggtgggtgttgtgactccrgtttcccagagaccttgagtcagaaccactcagctaatcagcttccaaacttcatgacctgcagaacctgtataagatactaaatatttatggtggtttgaagccactgaattttaggggttaatttgtcaagtagcaatagataactgatacagaggggttatgtatctttcccaaggtcatatcagtagtaaatgaaagaggctggatgggaacccagctggtgctgatgaagtgtgtgcagtttccctcagcttacctgcacagagataatcagagaaccctgaatcctttcttttccttttccttctttgtctccccatttttcttctctcttcctctcatgctatatgcacataatacttgatgatgagatggtaggtcttctctttccacacttgatccccttaaattcttaaataaaataaagcatatcacaaaaacaccaggtaaaatttattaagcacttaatatgtgtctcaaacagtgttctaagtattaaaagcaatactaataaactgtcatatatgtagtactctcagcagtctaatgtcagaagtagacagaaattttggctgggtgtggtggctcatgcctgtaatcccagcactttgggaggctgaggccagcaggtcacctgaggccaggagtttgagaccagcctggctaacatggtgaaagcccgtctctactaaaaatacaaaaattagccgggtgtggtggcgcacacctgtaatcccagctactggggaggctgaggcaggagaattgcttgaacctgggaggcagaggctgcagtgaggcaagatcttgccactgcactccagcctgggtgacagagcaagactctgtctgaaaaaaaaatggaaattttactttgtcttcataataaacttaacagataggtagggagatgatattgttgcattttatagatgatctgactgagttcaacatttaaggaatttgttaacatgacatggttttttcggcatcaggaggaaaagtagaacctgctaatatcaaaatattaaaaggcaaaagaagggtcatcaggctaattgcaacagcatttatttgaagtaaagccttctctgctctgtagatataaaaatatctgaggccttaacttttttttgcagggaagagcttgggtgaagaccatcttacatttgaatttatattcccaaattggagggaagcaatgtgcatgggatggtaaattgatctctggattattgcttgacctttcagtgacattaaaatgaaagaaaactgaataaaatgatatagctccacagtgttctaagcccattgatacaaaaacaatttaaatagcaaacaccgactttccctgttgctcttgtctgatttttaaataacattttcattatggttgctatagtagattaagctccttgttaggaggaaaattcagaggccactctgtttgagataaaaaatgtttaaacttgtaaatatcactgtgagagaaagattgggtaccataagagttactgtaaattacttaactgatagcactaatattgaaaatgtcctctacaagtgcttcttttaaaaattcaattcccttcaataaaatttgcatacttccaagggacttagaattctgagataaaagatacgtaagaataacaaaaatacatttgtttgagggaaaaatatttgcaactcatattatgtacatagggctaatgactctaatttattccaagtttctaaaaaccattatgaaaatgatacaatagaaaaatagtcaaagawtgttgtggcataattacattttccaaaagtggccacacctgcatttctagttcattgtggtgttccagattcttgtcatacactatcaggaggtggagtctgttttctcttccttctgttgaaactaggatagagaatagagtaggatgcactcagtgcaggtggagtgaatagcattcacctcatgcatgttggtgtgtgctccccacccctgcttcctccccctctacacccacttaccctctcctgggatgcttttctttggaatccaacagccatgctgtgagagaagccaaatcacgtggagtggctagccrtgagttataagagttctagttgayggaagaaaataattgaaatgtatctagcataaagaaaagacaaatatttaaggtgatggatatcccaatgctaagtaatatgaatgtattacattatcacatgtacctcaaaactatgtacatcgactgtgtgtcaatttaaacaataaaatttaaaaaatagagttctagctgacagtctcagccaagatctcagctggcagccaacaccaagtacaagactttctcagtcttcttttaaagtgttcaaactggttaagttaggcccacccaagatgatttcctaaaattaaactcaactgattagggactgtaattatgcctgaaaaatctctttacagcagcatctagatctgtgtttgaacaagtggggagggactgtagttcaccttagccaagtagacaagtgaaaaatccatcacaggctttatgaagattaagaaaatgtcataatttttaagtctgccrttcattattcattttatttatctcactcattctatartataacttaaaaatgtacttttatgggtggctggcagaccactggagagataattcatggggcataaacctatttttggcattactggttatgccttacttgagttaattcacctctcaaaacattggcaaatgtttatttttttaaaaaatcttacacaggtgcttggtggagtgaaaaatnctactttctaagggttaatatgactataataaaaatacagaataaatatataccaacatttaatatgtctttaatgaagaaaccagtgcaatccaggggcattttgaggacctgggtacttctagacattttgttaaaaaggagttggagagggagaatatttgaataaaattactaggttttatacaagactgattagtatcccacaggacaattaaaccataaacttcagtggttctttcgtactagacaaaaactacaagttaacctataacttgacagtggtggtacaataatcaaaatgtatatagcaaagccaaacacagatatgttcttttagagaattaaataatccttgagtgggcttggggaacaaaattctagtacagtattgaacagacacgccacatacaccattgctaccactactgttagctttatttcctagtttttgatcatttttgttaaccagggtcatattgactttgagtcataatatttgctaccatgaaattctttaaaaagtccatgcgttatcttagaaacattatgatayataaaaaaatgggaatgtctcattcttcagattactyrgaaacaatgggtgtaaattagcaaagaaagtgagaaaaataaattaaaaaagtgtagctctttatgtaagtatcttatcagtaccatgtttcataacatgatttctctcttaaaatagtgaaaactcatggtaaaactaagatgacctaccttgtaaatacaggcaagtgggataggtttcaggattaactcaatagataaattggaaattagaccttatctgttaataacttcagttctcctgctgccacatactatgtttggaactgtgttcagtgaggatattttgtttgcattcacattttgtctaatttctagctgaacgtctacacctcatttgtctttacatttaccatttgccaatgtcacacattgtactgttacgattcttaaatgtaagtgacatccattttcgagaaataagtgtttcattcatgaagggtmtttttaggtttatgttaagtttgttctcattttcagtttgctcttcagacaaatagtgtaatatatactgttcttcttccttcttattgaatattttctactaaacctatctttttatgattctgaaatgccagcttcagttttttttattaattcatactgaccctgggcagasctgtctatctcaacytaatggctatttataatatatggatggcattcccctgccattaatgtttaatgaaytggctcctgatccaatagagtctaataaaggtaatcactagaatacattgtctttctgcagtgccctagaaacttcttttattttccctattgtatacctttggcccatagtctcctttttttacctctktcggtgcactcttctcaacctctttttcattatttagtccaattgcatacatttttacacttaatttctttacaggtcaggaagacagtcttctgagtggaaactttaaaaaataccagccttacatgattgttagaaagaaagaaaaccttaaatactgacaggatgcagacttatttacatgtagagtagaagaaaaacatttttaaaaaatctaggctgcttcttacagaccrtatccctagtggatcaattctttttttgtaatctacatttgagatgtgttaaaaacaaarttgggtcctggaattagataatggtgatggatacatgtttttctgaatatactgaaaagcattgaattacatattttagaaggataaatgttatggtatgtgaaaaatatatacctatgctacattaacagttacatatttttaatgatatktattaatatatattatatgattttgtcacatataatagcatatataaaacattggaactggatgacttgagggagcaaagttgagcatttcctgatactacaaacatgtatgtgtgtgtgtatgtgtgtgtgtgtatatatccctgtttttcgctctcctaaatcagttctttccagatttccagtgaaaggaattttagcttgcttatgaatgccatctaattagtttatttctttgttactggagaacatgaacagaggccrctatttactcaagtgtgcactctccaaaggtctttcttcattcaggatgacttgatcctgagggttctgccatctgttacctctaaacagctagccagctgctctctagtctttccagtttaagctccattcttggaactgcacttatttcagtctggttgttgtattcaccttggggctctgtattcctgaaaccatggactgctgatatcttagcagccataagaatcttyctacttgtttgaaataggggtttctggatccagagcctagagatcatcctaggtatgttttctaagatgtactttttaaaataaaattaaaatactttattttttagaacagctttagattttcagaaaaattgtgcagatagttgagagacttaycataacattttccttccgtgtcgccactattcccccatccccgccccaccaccaagtgtctcctactattaataccttgcattagtgtggcacatttattactgaagttaatgaaccaatattgacacatttatattaactgaagttcatactttactttaaagttcactcttggccttctgtggttctatggagttttacagatgcatattgtcgtgtatccaccattacagtttcgtatagaatagtctacattgccctaagaaactatattggatccctggtaactagtaatccctttattgcctctatagttttcccttttccataatgtcatatggcagtatgtctgtaaggtgcctccacacctttttatggcataagagttcttttaaagaaaaaattgtagactartattctgtcgtatggatttgccacagtttgtttatacattctcgtgttgtgaaagacagattattatgaataaagtttctataagcttccctaagcagacttttgtgtgaacattagttttcaactcagttgagtaaatgcttaggaacttggttactgcattctgtggtgaaactatgtttagatttataagaaactgtaaaactgtagtccaaagtggctataccattttaccattatttccaccaacaatgcatgaacgttcccatcactccactttcttgccaatatttggtattatcagtcttatggatttagctatcctaataggtatatactggtatgtcattgttttaatttgtaatcccctaatgacatatgatgttaatattttctaccattctgtgmcttgtcctttcattctcttaacagtattttttgtagagcaaaagttttaaattttaatacaattcaatttaaaattttttttgtagataattttttgttgttatatctataaacaaattgccaaactcaaatctagtatttttccctgtgttatctttcagaggatttacattttgcatttttcattttacatttagttctgtgatgcgttttgagtttatttttgtaaaaggtgtaaggtctgtgtgtagatcccccctttttttttttttggcatatggatgtccagttattctagcactatttgttgtctattgaattgcctttgctcctctgtccagggcaagttgtttatgtttgtattggtctatttctggatttcctcttctgttcttttgattcacttayctattctgtcaccagtaccatgctgtcttgatcgctgtagctttgtagcaagtcttaaagttgagtagtatcactccttcaactttgttcttcaatattttattggctattctggatcttgagcccttctctatgaactttacaatcagctttttgatattcacagaataactttctgggattttgaytgaaactgcgttgaatgtataatcaagttgggaagaaccgataacagtatcaagtcttcctatccatgaacacagaatatctattcgtttatttagattttatttctttcatcagaattttttatatttccttacagatcctgtacatatattgttagatttttacatctatgtgttttattttttacgctaatataagtgatattgtgcttctaatttcaatttccatttgttattttctggcatattggaaagaaatattttatcctgtttttttcaggataaaagaaaaattttatcctgtttttttcaggataaaagaaaaattttatcctgtttttttcaggataaaagaaaaattttatcctgaaacattgctgcagttgcttatttgttctagagaatgttttgtcaattttttaggatttttctacatagtcagccatatcatgagagcaaaaacagttttattttcttcttcccaatcgttatatctttttcttaatattctttccttttcttgtcttacttttacctaggtcttccattatgctgttgaataggagtattaacaggggaaaatcttgccttgttctcagtagcttgctatatcaaattattacagactggtagcttcaaacaatagaaatttsttccctgacagttctgaaagccagaagtctaaaatctaggtgtcagcagggccgtactcccacagwagctgtggagggaaatccattccttgacagcttctggtagctccatatattctttgggttgtgggtgtgggtgtgacagtgatctctgtgttcctggtcacactggcttcttgatgagtctgtgttatttcacctttgcctctaccttataaggatatttatgattgatagcattaaggcccactcagataacttagggtaatcttctcaccttaaaattcttaatttagttacagctacaaagtcctttctttcaaagaaggtaacattttcatgttttaaaagttaagacctgatatctttgggagatcattagtcagcctactatactacactgatcttaaagcatccagtttctctccattgagtatgatgtcatgttagctgtaggtttttttgtagattttttggtatcgagttgacgaagtttcatctattcctagttkgctgagagtttctactcataaatgagtgtgggattttgtcagtgcttttctgtatctgttgctattatatgatttttcttctctggccagttgatacgctaagttacgtttgttgagttttttttgttgtttggttttyttctattgttttttttttttttttgagacagagtctcgttctgtcacccacgctggagtgcggtggcacgatctccgctcactgcaagctccgcctcccaggttcacgccattctcctgcctcagcctcccaagtagctgagactagargtgcctgccaccatacctggctaatttttttgtatttttagtagagacggggtttcactgtgttagtcaggatggtcttgatctcctgacctcctgatctgcccgtctcggcctcccaaagtgctaggaatgtttgttgagtttttgaacgttccaccagctgtgtacctgaaataaatcctagttgtagtatataataacttttatacattattagatttgatttgctaagattttgttgacgctttttatatcatgttcacgagcgatattaatttctagtttttctttcttttaatggggtttgcacgtgtattctgattttgctatagagtaatgctggtataacataatgacttaggaagtgttccctctgctttacctatctaaagaaggttgtagagaattgctatcattttgtgcttaaatatttgatagaattcatcagttaaattgtctggacccaatttattatttatttttagaaagttaattattgattcaatgttttaaaaagatacagatatagatataacctgaatagacctattcagattatctatttctctttttgtgagttttggtagtttgtttcttttaaggaattgcctctgtttatctaagttatcamatttgagatcacagagttgttcatcatatttctttatcatctttttaatatccrtgagatcagtagtgatgacccctctttcatttctaatgttagtaatctgtattgttgctctttttttcctggttagcctgactagaggtttagcaattttattgatcttttgaaaataattagcttttggttttgttaatttttctctgattgatttcctattttcaatgtaattgatttctgctctaatttctattctgtttttcttctgattgctttaggtttaaattgtttttctttctgtgggtttctaacagaagtttagattattgattttagrtctttcttcttttttgatatatgtgttcagttctttaaatttcctgcaaagcattgttttccttgcattccacaaattttgctaagctctattttcatttttatttagtttaaaatastttaaagtttatctttaagaaatttctttttgcatgccttatttttgttgttgaaagctggaaataatacctcgagtgatgggaactaagaattttttttttttgttatgaggttttatgttaatctagcttagagctggactgtgtttaatgcttgctgtagctttaagtkccagatgcttctgtgtgctcgtattttttgtcttccctgttgtctttgggctttcctaagagcwccttattcaatagagtctgtgtgtttcacctctcagttgtaatcaccaaagmcctcttcacgtggtgatgaggtctcaggaaggataattgttgtatattatgattacmtctcagttttcttagtgagcctgagtttctaggctgcgatcttctgaaatgttctgagcccttttttcgtcccctgacattagacaggaaggctaaaagagtctggaggggactaattgcccttctcccaagtcagatagaactctggtaaaatagcttccctgaaaggacgtgtctttcttacagagaacaatctgggaaacttccaaaatggttactttttctcttccctgagatttttctccagacttccccatgagaacatgatagggttcttggasataaaactcasaaaagtatagtctcccctaagactaggctgcaagagtttttaactctcaagctagtctgcactgagcctcmagcaatttgtcaaaattatcatacacgtgttcgtatcagttcctaggtccttctgtttttgctttaggtaatctgatcttatgattctttgtgtttacatgtttctccaaatttggggatactaktttgctttggacctcagttctctgctgaatctaaaaaagtcattaatttccagttggttcatcttttttccttgtcgtaaatatttttcttgttgcaaatkgcagtgaagcagtgtcattggctgggataatatccgagatttgtcatctcatgccgggaaaattaaggacagggacacacacacacaaggagtgagtttgggagctgaggattaataggcaaaagaaagagaaaggagaacagctttctctcttgagagagaaaagggtgcctgaatgagacttccagcctgtggcagagtgcattggrgtttataggcaggcttgaggaggcggtgtctgatttacatagggcccaaagattggttggacgaggtgtgatgtttacataacatgcgaggaagctggatgccctaccctgatcttaagcaaatggcgacttctcccagctggcgccatgttgcctgctcgttactctacatgtggctggcaaagaaaagggaagatggagctgccattttgagcatgcttagtaccaggtagctttttcttattggcacaactgctggcattcatccattgcaagcttccagcttgcttgtctgggtctgcagcttgattttacaggctgctctttgttagaaaagaaaatgatttggcggctgcttttcattcaaaggaaaaccttacggaggactccataccctcactgtctgctaaataattcctttttaacgcctatatctgcagcttccaacttctttatatgtccctcacraaacatttttatgcaaatggttaaaagagaaaaccagatccagaaattaggaccattaatatgaaaattgaaattttaaatgttttcactgctttcttgcygaccaccaggacttcagcaggtaattaagatgtcagcaagattttttttaagtaactgaaagttctagctgctgtacttatatactttggatgcttgtccgctccaaatctcatgttgaaatgtaatccccattgttggttgagtggcctggtgggaggtgtttgggacatgagggtggattcctcatgaatggcttggtgtcatccttgcagtaatgagtgagyttgttctcagtctgtgagttcacatgagatctggctgtttaaaagaggctgggacttcctctactctctctctttctccctctcttgccctgtgacatgctggctygcctttgttttctgccatgattgtaagctccccaaggccctcaccagaggccaaacagatgctagtgttatgcttcctatacagcctacagatccatagccaaataaacctcttttctttaaaaattacccagtctcaggtattcctttagagtaatgcaaagagactaatatatatgccttttgcacctttgaaacagaagtttaaaaaatatttttatgattcaccttgttcgctcgtgacacaaacactattgaggcatctccattggctgaggccagttctctcaccaggtttatattttatagactcttgggttctgaatgagtactctgatatcttttgcaccttcagcctcctttttctcagctttgagaaaaacgcttgtgtgaatgcctggtcttttcacaaaataagcagagtattttagacttcatctgctggacttcctctgtctccagaaggaaacattgtagtataagaaattacaaaaacaggccgggtgcagtggctcatgcctgtaatcccagtactttaggtggccgaggcaggcggatcacgaggtcaggagatcgaggccatcctggctaacacagtgaaacccggtctctactaaatacacaaaaaattagccagcctggtggcgggtatctatagtcccggctactcaggaggctgaggcaggagaatggcgtgaacccaggaggcagagcttgcagtgagccgagatcatgccactgcactccagcctgggcgactgagcgagactccatctcaaaaaaaaaaaaaaaattgcaaaaacavattctcaaaactactgcttaaacttatcctattggtcagcttgaaggagagcaataattgctggatgttctttaatttgtagaaactggcttaatttgtgcacacataaaaagaagtctaatttcacaactacagattgcaaggcattattgtgtaggatargactgatgccgaaagaccacatgagaagatagaatatcagtttagttytagtaactgactctcctttataagaactttgaccctctgtaatactatagaacaaaatcttctttcctaagtatgcatttattgatcacatattatgtgccaaccactgtgctggtcacaggtgtgtgtgtgtgtgtgtgtatggcattgactaagacaacatctgtgaactcaggtttctgtgtagtggatataagatgaatgcctactgtcaastttccacaagactaccggaaaaacctgttgatcaagcaaagctatgattttagatctataggaaaagaatatacaagattgagagaatctgattagttgctcaaaatggataaattaggagagcacatttatggagttctgggcttgttctgcattactttaaggcaggtactgcaagtcagagaaatgattggaattggacaagagtttagacaaagtagtcttgtgtttgtggcacagagagggtcttgaaataagccctggtgagtaagctgatgaccttgctaagtaagttagttgattcatagtttttttttttttttcttttcttccagaaatatttcccagagcagggagccaagttgtcagtaataatgaaaacagtaatgaaaatatgcctagttccaaaattttcacaaagggacaaaaaatttttctagttatcacaaataaatgaacttgaatccttaaaatatagccataaggagtctttaaataaaatgcaaaaatctttattaaatgaatgaaaagaaagtttctcttccttgagactatcatttttaaaaaacagataaatgtggggaagtttattttgttattctaacataattctgtttgggaatgaaaattaaaatagaatttttttccctaaagcaaagttatagaacttcctattgcaattatccatgctaaatttgctgacatgagtgttttcactaaagtcttcaatacataggctgtgctgggaaggtctgggccatacctactgtctggctacyaaggccatgaatctctcttaaagatgtgttttgtagtagacctgaacagactcattttagtggagtccaagagactatatcttctgttttaatagatttgttttttctcaaatttttgaaaaaagctgtgctaccaccttgaatttggaaccacttcttgttgttgctgttattgctatgggcatgtttttgttatagacaagtttttgtttccatatcattgtaaacatagcttatgacacatattctcaaatgtgcaaagaaaagtataatgtttgagyttatacatccatgtagtaagtgtggatcattcattccatatataagatacatttttaggtaagcattcaggtaaagggtattttgtcatttcgttcttcaaatatttattgagtgactgatatgtaaatggtgatatatatattaggtgttaaggtgttagggttttggagttggggatttagtggaagagagtggaaccagtgcctgccctcaaggagtttataatctagtgaggtagagaaatgttcaaccaagaatgagacacataagttagtattagagctctggtaagtggtgtgaaagagagttatctgatattataaaatcgtgtaaccctgtataagatgaactttcaagctgaactgagagtagaaggcagagatgataatgaggcagagtgatttaagtagagaaaacagatatgtaacatccctaaggagaaagaactagaastcaaaggcttatcattactgccaaaatgtaatttgtcatagttgtgttctttcaattgtcttcgttaaatattaattattttaataaaagttatataagtgcattttaatatttaatctacacaaagatgagatacttttattaatttctgtaaatgtttcagaacattactttttctgtgattttaaatatttgtgaaaactctttcaatctgtccttcaggaagactcagctctcatctayatacttgccaatagaaatagtgttttcacgttaaagaaacaagcttagaagttaggaggtaccatcatgttaattgctgccttgtaatggttatttattgtcattttgtttattgacagtgactagaatagcagtatgatcagcatgatcattataaaaaataatgaggcttttttcttttttttgagacgayggagtcttgcactgttgctctggctggaatgcagtggtgtgatctcagctcacygcagcctctgcctcccaagttcaagcaattctccccctcagcctcctgagtagctgggaggacaggcacccrccaccacccctggctaattttttttgtatttttagtagagacaggatttcactatgttggccaggctggtcttgaactcctgaccttgtgatccacccgcctcrgcctcccaaagtgctgggattacaggtgtgagccaccatgcctggctgaggctttcttttaaacagaagaattacacttccaattcaataaaatttcctctagaagagaattggatattaattcaaagaaatacgaagtttttattttaccctatgcttatgtagaacattagagaattccccaaatctctaaatcttcattttccaactaactgaatggcagtgataaaatttcctgtctaagcaaattatttctcaccatagatgttctctttatgtaaatcttgcattttgagcctaatgytgtaagaaaccaggtctgatatgtgtagtttttactaatccattgtttaccttgttagagaaacagtgagcaggttagctacctaggcgaattgatttgaatggagacagaattgttagacatacgttaatttgatagcaccttcaaggaccaactcaagggaggcctgatttaccctcattgmcagtcacttgcttttgttagtagtggatgcaggagctatcatgtttcattctcaaaatcacagtatccgtttgcacacggaaaggtggaaggaaggcctatgcaagtgtctgttgaggcattttcagctggaggtctgtcttgatttgtagatscacttccctcttaactgagttttaggattacagttctaacatttctgtgacttcaaactcagtttgtacagaagtggccattcagtgaggtcctcatcctcattaatgttcagaacttcaagagtattctttgattagttttgggagtcctcggtttgtccccctttctgtacctcaagatttgatatgttttcacaccgggggaattggtagagtatcattaaaggattcatcattactgcttcctgaagataccctgtgccccagatagccccagacacacactgacttttctgacatgtgatgattttgctgactataatctggtctctatctctgcctttgcagatcttctatataatttaaggcccagcctatgtgtccctggtctatgcaaccttccatttctctcccatcctagctaagagttgtgttcctgtcttctgtaccttcagcctcatttctagacatacttgttaaattctgcttcatattggagttaattgtataaataccacttaactctcactcttaactccaaagagcaaggttaaaattgtgtctggttttgtgtcccgcagagcatgaaggatgtgctagaccatcagcaagccttcatgagaggactagaatacgggaggcagtactgcagcgtggtgtagagcttgagctctggaaccaggctgcctctgtctgcatctcacttcctccagttagtagtctatgatcttggacaggtctctgtgcctcagtttcctcattgggttgttgtgagggtttaatgaaacaatgtacataaagcacttggtactacacctggagtttggtaagttttcagaaaatgttaacaattatggtcagcaattcagaagygcatggagcctctactatctgctcttttatacattcacagatgttgagtattagctctgtgccaggcattatgccatgttgagtctgcaaaaatgaataactatcttcataacatggaagggaaggatcaataccaacaacagaatgcttagtataggacttttttatgacagtgatgtgttgaagtgaatttcatggtaatggaaagcagatgtgccatacattgacctctatactttccgtgcacttgatagtgcatagagacagcagtactaacatcaagaactgaaatttttagattattttgaatctccagttcaattagttcctaacttkttaatgaacaaatccattatcagagatgctaatagggaataacataagctaaggttttactttcttgtctttstctttgtctatgctaatgggcgtttattttattttattattttttggagaccaggtttcactccctttccccaggctggagtgcagtggcgggatctcagctcactgcaacctctgcctcctgggttcaagcgattcacctgcctcagcctcctgagtagctgggagtgtagatgtgagccaccatgcctggctaatttttgtagttttttttggagagacagggtttcaccatgttgaccaggctggtcttgaactcctgagctcaagasatctgcccacctttgtttcccaaagttctgggattataggtgtgagccayggagcgtggcttctgtgctaacaagctattagtgacttcaaaggtgggcagcagaagttagcccccaaatagcagcagtccactgttatgtagattcctctggtaatagtcacctggaagaaaatctcctataggtccagcataagtcctctattactgatttcggtttatctagtttgagacctttgaaagttgtcttttaatgccctttctatgacctattgcaagaagatcattgtcagtctgctgtgcactgtgttttaacagcagatatggctttctctggaaggataaaatccttgccggtgttcctccccatggttctttgtagattctttctctttttgccattaccttcttcgccccatccckctttcacacttggaaatggccaaagccgaactaatctctgaaactgaatattagagctctgcctagaatcttggcccatttttatttgagcttttttcctacctcatttttgctggaaaatccttccatttggcttttaataggggtcatttgtgaacaatatttcataaccagttacagatttcaatcttytgcatgtgtatgataatttatagtccaagtgcttttatacttgaacatcttttatgagttctactgccttttccctgaaaggaaactgctttcctcttcccatattgcaggtaaggttattgaggcaaatggactggtgaaaatgtggaatctgttttaaaaaggtagaaccatgtcactgtgcaagtaatagaaactcaaagtaactttaaccaaaatagggattgtatgtgaaggacacaaatgtgtctctcactgcagcaggaaagagagagggcaacaaagcctcactgggggaggcaagcaagaactgcagttgtggtcggagtctgtgctttggccttctttttctctgtttgctgccttctgtgctggggctccatgcgcctgcgtggcctggtctcttagaccactgagtctctgtcacctgacttcgctgtcacaacagatacaacctcatcccatgaattctaattccaaattctctggactgagaatctgattggctggcccagtgtagagtcagatacacccccttggtcatgttagttctggcgtcgtatgaggcctggtcattttcagagaaagctatgggcctgaatagatacttaaaagaatcttctaaccaacccatgagtttataactaattacaaggtcagcaaatgttcacccataggggtgtaactccccattttttatgamccgaaatggcagttttttaaaatgaagttagacatttctccctcaaagttcctgtaacacttacagattcctttcttaaactcttatttgttccaacatttctatctgcttcactagactgtgagcttcttgaagaaaatgaccctgtgttgttcagtcttcacatactcaatgcctggctcaatgctaggatattttaaatgcttagcaaatgctggttgaatggagaaatagataaaagactgcctacctcaaaagatatttctttgcactcccacatttttaaaatttttgtgtttaagtcatacacagctaaaagataactgaggcaaaaatatctgcctaaagcgataagctaaagcaacttttgtgttctcaggaagtagtatcccatagtgcagtcataactcactggaaaataccaagatttctcaaaagaacagccagcaggtgatccaggacagtttagcttctggtcagtaaaagaaaactatttcaaatggaaagaaattctagatttcaaatgaatggacaggaaaactccagtgattaactacatcaaccaaaggttcccaataaggttaaagacgtagaaaactgaaaatatcttgatggctcatacttattcctttaggtgttcttcttagttcttattttttactttgaaagttttaaattaatcatttactagtttttgatggcttccataacagattactgaaaacttagtaacataaaacaacaaaaataaaatcatttaacaactctggaggccagaagtcttaaatggctctcactgggctaaaatcaagatgtcagcagggctgtgtttcctctggaagctctagtagagaacctgtttctttgacttttccagcttctcatggccccttcctctatctttaaagccagaaagggcaggttgacttctcacttttcatcactgtgaccttctcttcagcctgtctcttccatcttttaaggacccttgtgattatgttgggcccacctagataatccaggatcatctccctgccttaaggccagcagattagcaaccttcatcatctgcaaccttaatgcccctttcccatgtaagcatattcagaggttctgagtattaggacatggacatctataggtggccaggattctgtcgaccacacctacacctactgtgaacacagatactatggaggatataaaagtaaactatatatagcagtcacaatcaaggatgtatactggctaatgaaaaagtcaacttcacataatgtaaataatacataattgcaaattctctgtctcaaaatttccctttcttcttactcaataaatgtccagcttcctggtctctgactgtgccagtcccaagtcatgttgcctagtccaattttagggttgcaactagttctgttaacaccttaatgcaacacattaggatatacagccataaacaagacatcaggttttgaatagacaaatgaactgctatgaatgaactatgcagtaaagtgatttcctccaacactgttagtaatctaatctgagaatgagaagtgaaaattgcawattatcccaacagtacatcatacttaacgtcctcagcctaaatgctataggagatagagattattcagcataagaatattatgctaaaaactcaaaagttcagactgcttttcaaggagttgaagcagtagggtgttaaygcctgaaaagctttttgtagttaccttgtttgcccatttagacttcaagggcaagtttgaggttctwtgaatgatatccacagtttgcatttaaatttgaaggttatttattaagtgacattttcagtaagatacaaaacctacctcctggttagtgattgcacgaagtcatttttagtgcatgtaagagagcagtgaatcagaatatttatagtttagcacttttaaaaatgtccttcaaatatgtgtgcacataatagcttcttagactatcaagtccaagttttacaagatttaggctgaatatcacacatcttcaataaatagttttgtattcatgtacgtggtgatcagcaatctagaaaaaatataattccagaaaactaatttgttaggatcagtcctagatcagatatttttattttacttgaattgatcattagtaaatgcttaaatatttactaaacgaattaatgatgtatacagtagaaaatgctaagtgtggaagaacggtcatatgttaagcacaaaatctcagactgggattttatagtggtaattgctattgtgttcagaggcccgtggagacctaggataaacatgctgcatcttttgaggaattttgcttatttgagaacaaagttaaatactttacctactgagtaatttaaaatatttttgtattatgacaaaaatcatattattgagaacacaattcacataacatttcttataatagcataatttttccatggtatttttataaagtatttgaaaattttcattacattatgcaatttgcaagcatttcccatttattgtgtgtgtgtgkatatgtgacctcatgtagccctataaggcttgttactaaaraataattcaaaacccctacattgtccctcctycctctccctcatttcttttaaactgattattttagtatttatctctgtatctctaagtaatatgtatacttttttattttttacatttcaagctctttctattgattttgcactatggaagcagagaacataactaatatcactartcttcccttcacttctattgcacacgctcttcttctgtcccttatctcaatgtaattttactgcaaatttgatgaaattaatattcatattagtacagtattgaaatgtcatctaaagctgaagtgtggagtaaactaccatcacactttctatcctgcctgacttttgatttctctggatgtaataattttcttgttttttaatttgcttggttttgtaaatacttatcactgtcttagcccccaaagtcttcactggttgtctaaataccttctcaagatgttcatgcacttctggtattctggcactttcatcttcctagagacatctctcctgcagccctgctctctcattttgctggggtactctatgtcagagaccctctattttactctctacaggaacaaagcttaagtcactggccaggatgagggggtgtcrcaatctcctggctatcaggagtgggagatgggatctgaggatctaactcctccttaatcctttcccttcccctgctcaaacatctttagagagatataatatatgtagcataccattcacccatttaaagtgtatattctgtggttttcggaacattatcagaattgtgcaactatcaccatagtcatttttagaccattttcatcaccaccaaaagaaaccccagatgcattagcagtcatttctgtttctcatgaagccccctccgcggccctgggcattatgattccattttatgtttttatatcttggcctgttctggacatttcctataaatgaaatcacacagttgtggtcttttgtgactggcttctttcagctagaataatgttttcatggttcatcatgctgtaatgtgtctcagtactttatttttttattgctaataatattccattgtatgcgtgtaccacattatttatcttttcatccatcaatggaaatttggggtgtttccacttttaggcttttatggatgatgctgttataaacattcatatasaacttttgtgtgaacatatgttttcatttctcttgggtgtataactaggagtggaattgctgggtaatatatatacctttatatatactatctttatgtatataataaattagatgcatcattttacatgatcacctgcaagatgtaagggttctgatttttccccatcattattaatttttttttagttataggtgaccttgtgggtgccaaatggtgactcatggtgtttagatcaccatttctctgatggcttttaatgctgagtatcttttcatttgcgtattggccatctgagtatcttgtttggagaaatgtctatttaaaacctttacccatttaaaaaatttgaatcatctatttattattgagttgaaaaagttctttatatattctagatacaagtcccttctcagatatgtgatttgcatatattttctcccattcctctttgattgtcttctcactttattaatgatgtccttcaaaatacaaacttttacattttgatgaagtctaatttatatatattttttctttgttgtggctgtcgttgcttgtgcttttgctgacatagctaagagacccctgtgtaatccgtactcatgaaggtttacatgtatgttttcttctaagttttatactttaaactcttaggtctttgatctatttcgagttaatttttatatattctatgaagtaggagccttccactcttttgtgtgtagatatccacttgtccaaggaccatctcttaaaaagactactctttctctgtttgcttaatgttttaagatatcagagctcaaatacatttcctgctgtgctaaatatgtctatatatgtttttcattttcagcatgtatgttccttctccactatcattgtgtacttcagcagaaatgttgggaaaaacttggtataaagaaaacaaactttaatagatatgcttcaaccaagaaggctctgggatgtagacttttcattgaaaggagccattgaagataaacaggagaggttcatattaagctagaggtccaggttaggtcgtgcattctcagtgggagtgatatcacccccaagccggtgaaaattaattcttgggagcaataaaaagtcattctttttatgtgtaaagcgcagacatagagacaatacrtataaggatataaagaaaatctgtggtattaaaatttcaggggggcaattagaaaacgctccttgcagggatgatgatgaaaaaaagattgagaaacagtgaggtgaaagtcgcatttcatcacaattgccttaaaaattccttccttaagtggctcattaatgagtacatggttttgatatattgataygtacttgaacattcaagaaccactgaaataaaagaaaggagaaaaggagagtccacattcaactccctgggttttgaagccattcctagcagagrctttcgaaggacttctaaatgctctatatgcagtgtttgctctattgtgcttttatattaactctctattaactctcttaatgtattattgttagtgttattaggattaaataagataatagaaccagtaacttatagtgataaagtgctgtgtgtacagaagaggttttcaagtcttttcttaagttgagtatttctaatgataattttccactgtgataattttttctttttaagctttagcttttctagctactggtcttgttatatgtaatatgagctgaactattggtaggaaggctttatcagtgagtgcatggctaaatgtattcaaaatccttttatgacttgaatctgtccatggttttgactttgctgctttatcatgtctatacttgagaagtattatgtttgctcatcaggctactcctacatacagagtggtcctcagagaacattttcttctaggatttaagtgatgaaaagcaaggctgaatggagattttggtgaaaggcwttctctttggatccatctctaatatttttctcccccactttggggaattcactggaagctgatgccacatactttgttgatggtacccttagctaaccacctcaggacataacaagtttaatttgaacagatcaaatagattcaaaggaaaaatatttaagatgattggtaaaattctcaacgtaaatctaaaatcttttcatttaaaaaaaaaaacactcactttctccagaccagtttcctaggagactgccaattattctartgtgataagctagattrcaaatgaagaacttgttgaaagatgcatttaagctaaagactttatttctttagttttaattttttgatatcatttatatacagcaacacacataaaatttacatacactgtggattactgtagaatactgtcatcaaatcaataartttcttccacagttttgcattccacctcctctctaccacccctggcctcaggcatccactgatctgctttgtgatgctatagattaggtttggctttttaagtattttgtataaatggaatcatgtagcatgtatctttttgttcctggggccttttctccttcttgttactgcatgtgtcaacagttcattccttttcattgctgagtagtattgttgcatgattatactacagtttgttaagtcatctgatagtggacatttaggttgtgtctactttatggctattatgaagaaagctataatttttcatagatgagtctattggagaatatgtttgcatttttcttggatgcatacctacaagtggaattactgagtcacatgctatatttaaagtcaaatttacaaggaattgccagtggtattctaaaatggttatatcagttttcactctaccatcaacatttggaagttcttaattgctgccaatccttgtcaacacttgatattgtcagtctttttatttcagccattctatttagctgtgtagcagtatctcatttgggttttaatttgcatttccctaatgactaatgataagcatttttttcctgtaattatgttttcttttgtacgatgtcattttgggtactttgctcatttttaattgggttgactatcttactgagatattagttattttttattctagatataagtcgtttattaagtatttgcattaaaaatatgttcttctagtctgtgacttggctttttatttcctaaactgtgcctttcaaagaactaaagttctttgttcttcaaatccaagtcttttttttttatctttttttctttgtactttatatgtactaagtcatataaagtacctaaccacataaagagtttatttggttaactctttaggtaagagattcacagctgggattgttttgccgtcagggaatttcagtcagttagctgaacaggaaatgtttatttcagcgtctarcagttttaggggtaaaaagagttctaatcttagctaatcaatcctgagccacagagtgggaaattggctagaggtaaaaagggttgggtctctttctggccttgttacaggtaaacaaaaggggtggtctgcacattttgtgaaaattatgatagagtaagaatagtcatatctaagtcatttggggaagggtagttctcttcagcagccatttcccagaaccaaaaagrgtggggatgttttgcctttaattttcaaaaggtttgtaggggtggttgttaaccatcacttttctgcaagcacagggctcaggtaaagtttgacattgtcagggcctatttgtacttagattctttaattctttttgtatgaatacaccatgctactggttccctcattaagaaattcattttgatatgtttgctttatatttatctaaaagcaatgtttgtaactttttaaaaattatactttgacattctwtggatcttcatagatgctgtaggggacaaaagatttytcatctgtcactagactcatgactgagacactatgacaaaagacagattaaccggagaaaaacatacaactttatttaacataagttttatgtgacacaggatcattccaaaatgaagacccaaagacatagggaaatgtacatgttttaatgttcagtttgataaagtagatggtaggggagaaatattataggaggataaaaggttatggtctaatggtaataaactgggctgacttgggaaggcctgtttgttcagattcttctgtgtccctttgtcttcagagagacagagatgttccttttctccaggtacagtgagagaacctctgaaatgggagtcttaatgatgtactgcagaggtcagagaattactgtatagtctgcttcagaggagaagggcaggaagaaggtccaagagaccttcttgcttctgctgtttcctccagtgccaaagtggggtgtcctgaacgtcatcagtaacgtacctattggtcaggaaggcacgtttacaaagtcaagcttatccattaaatatttcctcaatttaatttactatgaggatagtttctatgttgaagaggatctgacatcaggctggtttctttttagtatgtcttgaagtttattgtttcttgacttgtgaaaatcaacagggtctcttacaaatagactcccttaccataaactcctgaattttagacagtaaaataaatgtatcaacaggactcatgaatgtgataattatagtgtattttgatgattctaatactcaccgtctctgaaattaatacgttccttgcgattggtaccatcttaggtaggatgtaatatgatatatatgtcttttgtttttcttttctcacctgtcgtggatatgttactgggaagggtaccaatccagagcctaagaaagggttcttggacctcatgcaaggaagaattcagagtgagtccaaagagtaaagtgaaatcaactttattaggaaagtaaagggataagtactttttttattccaaaatacttttgtattccaaaaagtaaagtgaaagcaagtttatttggaaagcagtttgggctgctcaactgaaaatacttataattatttcttgattagatgctgaacaaggggtggattattcatgactttcccgggaatggggttggcaattcccggagctgagggttgggttcctcctctttttagacyatatagtgtaacttccagactttgccatggcatttgtaaactgtcatggckctggtgggagtgtgttttagcacactgatgcattgtaattatcatataatgagcattgaggacaaccagaggtcacttttatcaccatcttggtttcgatgggttttggccagcttctttacgcatctgcatcttgttttatcaggtgatttgcaccttgtgtcaacctcctatctcrtctgtgacttagaatgcctaacctcctggaaatacagcccagtaggtctcagccttattttacccagccgctattcaagatagagttgctctggttcaaacacctctgacagatacaagaaaaaaatagcataatatattttattagaattcattaaggttatagaggcatttatttgcaaaagctttgtgttaagtctaaagccccaacaatcactttttcacttctgtgttctattgttttgttaaaagttttcaaacttctaaayaatagtgaatacgccaagttttaacgcttacacctggcaggaagaaaaataagttctgtattttacactttgtttctcctgacactatttttttcttttttttttttttaaatttagtcaagacagaagtttcctgcagtggcaggaatccagtaactgaggcttttaaatatctagctgtgttactcactattttgctgcagtcatcatacttaattggtacaccctgaagtgtgaaccaayctcctacaccctctacggcccttagaactggaaggatggttttgctagatcttccttaagaacactaatatttttttctcttctaacttgtagtggttagatgcacagaattcagacctgagtgttcactggcgtttaaatattgccttaaagcaaatcctttctgaccttgtggttattgagacacttgagcctgtggttgtattctaccctattctcattcattttcatgctctggaaggggcccagtggtacaggggtatccattgctaggtcccagcctcttgctttccctcccttgaattatttccttgtcatcccattgccagggtgaagttcacactccctgagttggcataggaaatctgacccactctttactctttctccacctcactctggattccaatttatattggataccctttctagaaaacccatggtaacagcacttggggtgcattattgaaacatgattttgagttgggcagcctagctacttactgtctgcaagtccctgggcaagttaattaacctctctgaggctgtgttgctttttatgttaagtggggataataatagtacttagctcctggagttactctaaggatttagcaaggtgatgaatgtaaattactaagcttagttcctgaatattttaagatactcccttaaaacaaatgtaagccattattatttgcagttgccataacttaaggtcttcccatcctgtcctcagaatgttttgatgttttgtagccttccggctttgaaggtctctccacacccactactcatcttcttccttttcatcttatctgtggtttggatttcaaagttttaatcaagattccatagctttcccctgaacagattgtatagccagtacccagccgctcatctgctatgtctgagcaacatttgttgaaagaaagattgaatgaaaactagtgtctatttccagtagttttagttttcagatattttaagggtgataggaaaggtctctgcccacttcttctatttctctacctcagcaattcctggcctgctgcagagattcctatgtagttttgacggctataactttggtagtcattttaaatggggacaggtgaaaaaaatctttcggaaccacatcaaggtaggtcttttttttttttttaactgaatagggttcaggacacatgacttcaaaatatggcatcttgatatttgagaacatagcagaagcaggaagatctcttttaccttccccttccccttccccttctcataagaccctcattcaagaggtaccctccacagatctggagaaagggaacatccttatctctgaagatacagggacacaaagaagatttagcaaacaggccttccaaagtccctcccagcttattaccattagatcatattttttcatccaataatactttttcattactatccacttttccatcaaaccaacatagaaaaagacacaggcttccctattttgagggtttcattttcctatgaaggctcccatgtcacgtaaaattcattcaatagatttatatgctttttccttgttgatctaccttttgttataggtgcctcagccatgaacttagtggtgagtgaggaaaatatatttttcccctatactactatcacaatttaatattttaaagtaataatcttaggaagcaccatctaaaatcatggacttttcaaagaagggatgccatatgtcaaagatataatgcactggacagttaaggaggtgattttatttaggatactgctacagggagagcattaattatggtagaacattttgaagaagaggaagtgggcctggagttttagagaggccgctaaacaagggaatcctgaggaacgatggagatgggatcttacagaaaggattgaagatttcttaattctggttttctgggagcacagggctcaggtaaagttgaacgttgtcacagagtgtttcatgggatgtacaacaccacagactagtcacctgccaggaagggaaattttattgtaatatttggaggtggcaatattatttttcacaaaagcccctgctgatatatgatggagtgtgtacaaaatctgcagaggtgtgtgtgtgtgtgtgtgtgtgtgtgtgtgtgtgtgtgtatttaatttccaacttttaagttcagggttacatgtgcaggattgcaggtttgttacataggtaaacatgtgccatggtggttttctgcacagatcaacccatcacccaggtattaagcccagcatccattagctcttcttccggatattctctctcctccccgttgaccctccgacaggccttagtttgttttgttcccgccatgtgtctatttgttctcataattcagctcccacttacaggtgagaacatttggtattcagttttctgttcctgagttagtttgctaaggatagtgacctctagtttcatccatgtcactgcaaaggacatgatctcattcctttttaatctgcatatatttttgagctaaagcatgagacatcaaagaaatttctgcttgtagcagtctactttacctccaccttccttgtcctcctcctgctcccctacttcagtgaagcaaatgttaatccctatgccatgttactactgtgaaatgtttgagaagcatgggttagggcatccacagcagctattatgttgaacactctatgaaaagccacaatccagggtgaaagagtagcatcagcagaggaagaaaactgggagagtgaaatgtgtggcacccacggagtttcttttattgtccatgcaggatgtgaatggacaagcagtgtaatatatgactgacagagtagatgatactcttagttttgaattccagggtaacgtttctggatttaattcatttggcaactggtgtccattgaaggttttagagcaaggatctgttaggagctaaacatgttagaagaacattttcagcaataggttaagtcataactctcagacagatacagaaatgaacctgtgttaaagattttatttaattcacaagggaagctgcagatgatataactggtttaaaagataatccaaacaacaggcatgtttataaaacaggaatattgaaatgtgtgtgaaaatggaggcaaagctgttttcttcctccaggtggcaggaaggaaggaggtcaaagtaaacctgtatcaaacaggaaataatttgcatgtcttaatattttgcattactattagttacctgtaatgtaacagagttgtaaaataccttgaagacactgaacagacctagacattgcgtaggttccacacatttttctttttctgaagaacatgatgggagctgaatattagtaagatcatagagtgtggaaatttgtgttgaagagaaagaaactagagatattaaggagattaggagactattgcacctgaccaatcatactgaaatgtatgattagaattatgatggtgctgggatggcacagaggtgtggaygcaaggtactaaaccaaggtgggatctaccaaagttatcaattgattagaagtgggagatgagaaaggagagcctggtggctartgcttgactggtatttggatttggcttctgcctagttgtgtaacctcaggcaagttacctgtcctctcttagccttagttagctcatctacaaaatggcgtaacmatagggtctgtcttctgaattaagcaagataacattttgcctcagtcagttcctgcttctataacaaaataccttagcctgggtgatttagaaacaacaaatatttattgcttacagttctggattctaagaaatcttaaaaggcttgagaaaaatgggtaaatttagtgagagcaaggaaatttggggagcttgaggttgatgataagagacatgggaagatgagatatccaatgctgcaatgaaattaaagcatatggaggccaggaagaggcaccagttcttaaactttgctcatttcagttactaatgacttttaagaggcataaattgggaataggcacgatggggaatttaagggagagtcaagaagacaaataaaatgagagctagctgagccactggtaagatcaatggaggttacagagctcaagatcatctcacataggtataaaggtgggccacattagaattcatgcaggtttccaggtttcaccataataccttttcaaaaatcaggcttgcaagccgacccagtttactaatttcaagtgtttcacttaggggctgagatccccctcaaggacagggcatgaaataagccatagcactaaccatgaacaccagtttgttgtttgtttttttttgtttttgttttttgagatggagtctcgctctgttgcccaggctgragtgcagtggcacaatctcggctcactgcaacctccacctcccaggtccatgaacaccagttatagatatccatctaaggctgcagactaatgtctcatggttccycctggaggccactgactgttttctttagtcctcatttctttttattttatcttttctttaaaaaaatataaactagccaccgaaatttttawtgggacatttcacataggaaagttagatttggggcggcttttggaaaataagtgattccagctactcagggccttcattccattcctgaaagcagttggtgagaagttgggtttgtcgccccgggtggtgcttgctctgtccggctggctgcagttcccactactccctattatcctcagagcaagtctactttactcgttttcagtacctgccaggcccctaaagacatctgtctttgcaacccctgtgccatcctgtgcagttattgtcgaaggtttggagttgtttctgcgtggtttgatgtttaaaccctggaaaatccctttaccctaggtagagagtattgaaatgtattcccgcatctcattatactcatctgaggtgtgatagagttgtttacacctcagtgagaaaaacaaacatgccatatctattaaatgcattaactttatagaaaagttaggtaggaggagaattctcatgacactttattcttaacctaaatcataaggaaaagttattataattctgccatctgttcaagtttttaaagccattttggtaaacttaatgctaatgcaaaatacatgccttagcactaattaacaaaaaaaatctgtttcattcttctcagataatgaaaaaatatgtcaagaacatgatttcttaaagaatatctaatttatggtgctcgggcctttaaaccatccttgygatgtgcttatgagcacaaccataagaataacaaaaagtcacatcaaatattcccattaggaaaatccccagactacaagctttagacatttacaattgtaatttagattcctatttccacttaaagattactgtcctttctgtctcatataaggctttggtattgatttttgggtaggggagtggattgtaatggagggctgaagaacatgggaagtaactgtaaggccagtattgatttaatgtccaagtccaaataccacattactcctgtagaaacctaattaattgaaatatatgtgatttgagtatgttatattaaatattgttggccgatgacttttcaaacccttttagttatattttgttagaggaatagaacaaatccagttatattatgtatttttttgctaatactctaggtgttttaaacttgcctgattttcctgccaccaccttcttgtctctgctgtgcgtttgatatagtatctctaatttatattgggaaaaatcattttatttggttacaagcccactcacaaatcttcagcacttcatttcttattagataaaatatggagttattagggtctttgctacctgtttttccggttgtagttctcactgttcattgcactgggaactcttcactccagggaaatgatttcactcaagatactgattatacctcacacaagggttaggtcttgctttggtctgcaggatgccatgacttttattcttgttttcttgaatacccaaaccattgtgccctaagaagcaattgggaaaatgatgatgatattgctgagtgtgtgcctatatgtgtgtctgtgtgtgtaaaagagagaaagcagatatgataaaaccttaacagttgaagtagggtattgcaggtattcatcgtactaacttgcaaccaattgtaggtttgagttattttgaaatacaatgttgtaaagaaaagaaatagttgagattagattagtaactcacaagtaagtgctggcccatttgaggctatataacaatcaaatatatttaattcttggtaatattcagaaatttcctgtgcattctggagaaggataccacgttttgtcctggtgttttatttcattagtttttccagtgctgctccttgaaggaggacatattggctgataagaaggtggattagttttcagaatgaaattgtgacttccttccttccttgtttccatagttaacagtcatatattaagtattggacagtgggctttgtctagagatccagagaagaacctcaggtaatctctgtcctgggaagtctacagtataggagaatacaaatgagaaaatcattgactgcaaaacagagrgaaaggtgtgatggttttctcttatgttttttccatgccatttgcaattttgactatctatagacatttgatattatatccttactggtacatttttgtaattgttgccaactgatcatcacactgaatacaatgagtgatatcatttgtttcatttcacatcatcccaaattgctgttcagcagagttgttcttaataactagaaacatgccagaatactttccatccatatattttctcctttttacaatgtcgattcagaatatcatgacagatcttccttttctgrcattaattggtgatatactaatgatagccttcattgtaagtaaaaatgtattaattatgagccttttttggcagtaggcattttgatttgctcactggagtgtagaatggaaataaaaacttaaaaatataagtagcaatgaatacttcagtgttctgtgctctttcartggtgtactacagtagaaactcgatgaggccacagtgttttttattttattatttgtttttattttttattatttattcatttatttattttgagatggagtctcgctctgtcacccaggctggagtgcagtggcgctatctcggctcactgcaagctctgcctcctgggttcacrgcattctcctgcctcagcctcccgagtagctggaactacaggcacccgccaccacgcccggctaatttttttttgtatttttttttaagttgagaaggggtttcgccttgttagccaggatggtctcgatcttctgacctagtgatccaccrgcctckgcctcccaaagtgctgggattacaggcatgagccaccgcgcccagcccagtctttttttattatctgtttattaaataatcattatttgctctttcccatgtacagtactagctgctggaataaaggtgtctactaccataataccctttgagcacaygtttatttccttctatttatttatttttttcttttcgaggcagagtttcactgtcgcccaggctagagtgcagtagcatgatcatgccgcagtgcagccttgacccccctatgctcaagtgatcctcccacctagcctttctagtagctgggactacaggcagttgccattatgatctgctaattttttaaatttttwaaatttttaaaatttttttatagagacggggtttcgctatgttgcccaggctggtcttaaactcctgggctcaagcaattttcccgctttggtttcccaaagttctgggattacaggttccttttgtttgttaatgtccaatataaagcactgtttttctttgtctacttgtgtagactttatttcctctcgtctgattcatctttgtgttgcttgcatcaagtgtctaacacagaacctttaacaacagagctgttgcaaaaatatttttgaattaatacattaatatgcttgcaatcatattttgtcatacagccaatgattaagttaggcatatatggaaatacttggcacacattcggtactcatgacataaaatttttccccatttattctagttggttctctttggaatgcrttttccagagttagctggaattttggccattctggaagtgcattggaaggtcttcataaactgtgaaacactattacatgcctcgtgttattatggaatagataacaaagaggctacatctgtctgactgctgtgtttgtcatgtcttgcacatagttagttcacagcagggctttgacttacaagcaagatttccataggtggaaatgggagggaaaagaaaggtatgctgtgtagaagaaatggcatgagcagtggcccacaygctggacaaggataagatcagttgaaagattaactagaagtgcctgtactgggtcaaggatggttttagatacacacacacaacatgcatggagtgtatcttattgtgagtcagaaactggcataactattcccaaagatacttttcaacactggaagtacaatttttaaatataaactttggaattggaaagatgaggttttcaaattttagttttttcacttgagctggatgatcacagaccagacaactaactgtaattatttttccctcttcttttgtgcaattgaagatgttagtacttttttctcagggtggttgggtgcttgcatagaaagccatcactgaacagtggttgatagtaataggtgtcataatgttcctcactccctatgtactactccctccccagagagagccaaggcattccataaaatcaacatgatctgttacagcttcttttgggamtatatgatactcaagtgctattgacctaatacttaaaagcctctggctgttttttatggatatggtwtactttgttgcccaaggtaaatgcaattggaatagcttaatccagtgaaagctctttcccctygattgcataaagctcaaaaggtatgtcttcataaaatctgtatgggggaagcatatgtgaaaacccacaaggaagtaatagagtttgtttgcacatctcccagggctacttacaaaccacgtgggtaaaggatgcccagcaatcataatgtcamctctttcgtttttgatcacccactcagacaatgagtttttgggattatctgtgtttggtgagggcagtgggagtttaaaaaatcttgttgaagcagcttatttagagattgctgtacacatcacaatccatcacttagcaggcagcaaaaccaagtctcattgtcgattgaaaatcaggtggtcttttttttaattcttcttctaaaggaaggtactttggagtagtgggtaattgcaaagcctgaagaagaaaattgtcataaaaatgaaaagaagaagattacttaattacaacaggttcctccagaaatcttcaagatgaatgggaaaatttagcagagctcttaaatgccactgtaattcagccccatgccctggaaattctaaattgtarttgaccctaattatatcaatacccgctggtgagaaaagacctgtttcttaggaagctttactgctgctgaactttgctaacaagtcacccatgacttcaacagatgttttgtacttttctggccgagggggtccttaggaaccaactttcctctccatttggcagcaaatgatgcaataatgctcttgaattgtcagtatatgaggtaaaaaatgtgctcctttagtcattgctcagactatttttatcttgcctgttagcatgttaggataatttcactagtaagcaactaaaaatgtgacccattctagcttaagcagacaatagaatttattggctaggataattggaaactatcttgctcagctgtaggtgcgactttatctagtgcatgtatggcctctcttcctctacctttccttctcttttttttctctttccccttttttctctctacgtttttctctgatatggtttggttatgtccctacccagatctcaccttgaatagcaataatctccatgtgtcaagagcagggacaggtggagataattaaatcgtgggggcagtttccccatactgttcttgtggtagtgaataagtctcacaagatctgatggttttataaacaggagtttctctgtacaggctctccttcctgctgccatgtaaggtgtgactttgctcttgattcacctggcatgcgtgtgaggcctcctcagccatgtggaactgtgagtccactaaatctctttcctttataaattgcccagtcttaggtatgtctttattagcagtgtgagaacagattaatacactctccctctttttccttcccccttctcccgtgtgtgtgtgtgtgtgtgtgtgtgtgtgtgtcttggctgtatttccttgatattgtgcccagtctccaggagactctcagatcatggttctaatgtcactcctggcactgggcctttctaatttgtccattcatgtcttgtaggaaaatggaaaggctcttctgataactgttgaaaaaaaaatccttcatccttattggtccaactttcatctctcactcatcccctgagccaatcaaatgaacagggtgatgggattttgccagttgtcctcaccagagctgtggcttatccttatagcccaagtgatggagtcagcctccctcagagcacatgggttttgtggaggaggagaagacgctgtttccgagaaaagtgtaaatagatactcggtgtgtcaaatgagaacagaattttgtcttccagattttttagtaatagttcattcccccaacttttgtttataaaaattgtgaaacwtacggaaagtttcaagaatagaaaaacgaacaccttgtgaggaaggcaaaaattctacccctgccttgttagagttttttggctgggcctgagaattaaactgatgtaaaacagtttaacagaagaaaagcatgcaaatatacttaatagaagttttatggagccctcattaggaaatgaagacataaagaaatggcaaaacctagatgcttttatattcgattgactgaaaagatgcaattgtggaaaagtaagtgaactctgtaggcaggctaaaggaagataagaattattttcacatggtatctttgtgcagcattctccaggtctcaccttttcatccttgatgataaaaatgtgactttccttctggtataaagaggacatcttctgtattggggttttatccctgcattcgggaagaaaaaggggtgagtcacagcgcccttctagcacctgctgttttttaagtgcctttagctcaaaataatccttatgctaaagtggcatatgtaggggtggcatattctgccacccttcaacctgaatactaaccatttaggttgaacaattgttaatgttttttggcaccctatcttaagtggtaggctatatcatttttcttactccctcctgacaaatttctcagagtttcttcaaatgaagattttaaaagttcagtactttagaattcaaatggaaacgaaatgtcatttccatggtgctgtgtcctttacctgccttctctcctttgttctctttctgaataaagccaagaatcattccattttccaacacgctgtctcatacaccctgaaggggaaatattatacaattaaatgcaggctagcattcctctagcaaggtaaatgcttcttatttcacagatccccagttgatctcttaaatgtaattccccaatgatatgaaagttctgaattgtttatcacctcagatcaggaatattatttctgaaaacaaatttgttatcatcagcaaatcagcttttgaaggtttttgtaccaaagaayaaacctagggagtggattttgaactcttagggggaagaactaaagttactttgaggacgttttacagcttttttataacgaggcagcttcaaatgcagatgaagagcaatgcactgaagaatgacaatttttagatatggttataagtcattcctctaacctggtaaaattctactctgaagtaacgaattccaaaccttgcatattcatttttgaaggtgtcatgttttctcctcgaaggctccatgtgcttatcgatttaaaaaattacttgtagttcccttttacattaagttgtagttagtcataacaaaaagagttaacatttcttaagtctttactgtgtgctaagcccttcactgagctcctamctgcattctttcatttaattgtcacaactcagtgaagtagatatgtgaatttctctcattttagagatgaggaaactgaggcataagatgttatgaaaattgcctaaaatcaagcaagtggcaagctgtggcacttggacatgaacttacgttactatgaaatgccattggttcaattcataaaaatttgcctaaatgtgagactcataagttgagagccagaggctgggcgtatatgattattatgaactttaagataagattactgctgtttttgagcaagaatgccaaatgtttaattttgtaaacccaaaacatttaatgacagaaaagctttaaaaaatatgtatctatgtataagtggtttttaagtttcttttcttcttcttcttcatcttcatcttcatcttcatcatcttcttccttcttctttctttcttcttctgtcttctatcttctttcttctttcttcttctttctgatgcaaggtcttgtgatatttgcccaggctggccttaaacttcagggcacaagtgatcctcctgcctcagattcccaagtagctaggattacaggtgcacaccaccatacccagctctgagcacttcttaatagccttacttggtagaacagttttaggtttatagcaaaatttagcagaaggtacagagtcatcccgaatactccctccccttccacatatacttatcaatattccctatcagagtgtcacatttgttacagttgatgagctgacacatcattgacacccaaagtccatagtttctattagggttcactcttagtgatgtatgttcgatgagtttggacaaatagttacttgcatgtaatctaccattagagtatcatacagaatagtttcaatgcactgaaaatcctctgtgttccacttttataagccctatattgtcattctaacttaaaatacgtaatcagctgtttaggagaatcattttgaaaacccagtaagagaaacaggaacatttggcaggtcaagaatttgcttcaactgcagcagagaggattgtagactgtgtggagaatgtcaatatgaagaaggtcaataatttgtaattggtaaattccaaccaaagctgaagagcaaaccatttcactttaaataggagtaaatataattcagaaaagctgaatacagagcttgagctccactcaagctccactccaactggagacagttacgctctcacccttaaaatttgttctgcaggtcggatctgtgttttttggcaccaggcagagatgtggctaatactcaccttgtgcctctcagccacctgttcttcctaattaaagactcccrttttctgctttgctggcctcataatttgcaaataaaatccacgggacatttgatacgaatgttaagaaacctgtgaactgtttgtttctagtttgtaaagtaaaagagagacccttccccttccttccccttttctcttctgccattttaataggacatttttcccctcctggaaataaaagaacactgttgaaatgatttggttttcctccttcaaagataactctctatatatatttgctggaggtagactttttattttagtataactgttctaaaaagaattcatttatttgccatttataattttgtttttctctacatttccatttctacctcatttgcctgtattactgcaatgcctctttactggtctgcctcattccatacttctgatctatttcctaaagcacagccagggtaaacaatataaaaataagcattttttaagcagaaaattatgaagggaattaaacagtttactttaacataagcataggcaaatttaagaaaattttttttatatcttttgattttacaattattcattgtataaaaatgaatttattctgcatttattgtccaatggcttgttttggttttgtcacataaaatgtacatacagatagtttttttccagttcttgttaatgcccagataattgttcactgtatgcttaccatagtttctggatcagttgccaatattgatttatatttttaaacattttcctgatattaaaaacatttctgcaataaatatttttgtacataaagttttgcccacttgtgtaattccactagaattggaagttctggatcaagggctgggaatatcatatatattgcttgattatctttacaaatgactatatcatcctcaacatcactagtttcttttttcaattaacaaaaaggtttttcccctaatatcgtaggtgaaaataattttgtaatgaaattgtaatgttcagttagtcacttgttggtaaggttgattaactttatgagcttattggccattttgtatttctccatgatagaaggtaattatgagtgagtactttgaatattgaaccctgaagtttagaactttgaagggatcatctgattctaagaacatttctagcctccttataagttgagcttatgctatgggccctctgataaaagctgtgtgcattgatggttgacaatatgtatgttaaaggattttttgctacatcgaaatgcaaaattattagctacaaggaaattaaaagtgggccaacatacagataattttagatataaagtatgtttcagtactgatttattgtggttattttcattatattcattaaatgaagctcatgacttcttgaattcatatccatattctctatcctaggggatctgactgctgatataggctgtatttctgtcaaccatagtggattagttgcagtttttaccttttaattaaacagctgctgccgctaaacacaattttgaattacttaatagtccatattactttagtcaatgcacactacctgaatgttttaattatatgaagctatacattttttatgatacagtttttctaaaaatgcattgacagacagtaataatttgttcttttgagatgtcaggaatatcttagcatatttttaaataatcataactaaaattaaaagccacgctgatcaaatgtaagatcttttgctttaaaatataaatgtgaaacatctagaattttaaataaaagtcccattcaagatgtttgtagtctctgtctcataaacaagcaacacgtgtggtaaatactgttgagcacaattcagaacactcaagatcctaaaaatcaaacttctcattgaggccccaattcagaaattcattgccttacaattttgtggcttctgtggcaacaaagtttgtttaggcggtgtcatttggaagcagaaatcagtcagtaaaaaagctatttactgttaatcaacatgaaatcttgtaaaggctcatgattatcttgttacattattctgagttatattcagaggtattccttaaatttttggttttaataagtttaagtgactaatttactacagctctgagaaattatagatcctgggaaattatttttagaaagtgacaattgtgtgaccttttatccttctctctttatttaatggaaattccatccctccccccatacatttatgtgtatataggtatgtgtgtatcctatagacaattccctttccttgacatttatagggaaaatatgaagtataataactgaagtattgaacattagaatgaacagttgaaaatttgtcagattatatttttaggtttatcactacacctaaactgcctgagaattgctgtgatcagaaaagccacttttaatatatatactggcttgatgggaactggtatctttaacctcagcctttgattgaatttctctaagtggtagaagtaaaggagaatggtgtaagacctgtctgagtttttcagctatacaaaccatttaaccgagtgtacatgatggtaacgtcaggattcctgaaataaattatttctgttctccctgctgactcttacagaacataatttagagagcacatctggtactttctgtctgttctgtgttgacctttcattgattctttatctcctttcctggctttaaaaaacaaaaaagttaaagtttattttagaactgggtggtgggataatattataaaacaatgtaaagcatcacctgccactgtcgtacagattatatcttcaacgtttaagaaggtggttatcattcctcacggttgtaggtgttaccctgttcaagataatagtttctgctgttgaactggtgtctatagattaaataagagccgttgcctctatcttctaaaggacttcaggggcttaaaccgtggagcttaaagcatgatggaatttggtcaaaagatgtagccatttgttgagcttaaagtcaagattttaagctcagtccctagagtgtatgcargcacaggtcaagctctccccatcgcctctccatggccagtagttcttgacaatactaatttgtcagtagtgttacattctctgaagaaaccaattgagtgtggtttgttgatgttatttgtttctttgtttgccccactagaatgttagctttatgagtgtggggatcttgtcccttttgttcagttgttgaattaatgacaacatagcattcattgagtgttaactcttttcccatctgtgaataccacttaaccagatagttatccaagtgagcaaaatgaagctgcttagaggtaaccctgtatttctgtttaatcatagaccaccctcccaaaggcgaacaatccatttgcttcatattcagtgttaaatatgagtggcccaaatctaattttttttttttttttagttttggactgaatattgacatcacactgataaaatgagaacgctgattcaaggccattgtggttcacttgaaaatgtgcctatcaattcaagtaaagacctagtggcttggagattagactaacatctayttctcctggtgtgttaatatgctgacaaaaagcaaggagatggagaagcttggggagatgttcacatatgtgtatgtgtttatataaatatatatatatgaacatatgtgtttgtatgaggaagaaggactgaaagcagtgctgtctaatagagttttcagccattatgaccatcttctaaccaatagaaagaatgaaagagagaagaaggggcaaaagcagtcaacttgaaattagaagatgtggtctttatttcggggatccctgtgctcagctaaaaataaataatatagttactgatgggaagaggtgaagaggtattggagttatctaagcagtcaactttgcctcaagtacctgctctctgcaaggcattgttctaagtgttgaagctacagatagtagtgaagaaggcaatataatttatctcatgaagattatgtggattggggagaagcaaacatacatacacacgaatatagaacatgcctggaaataatatgtactttgcagaaaaataaggacccaaatgggttttgtgaacatgttaatgaaaaaaggatgtaagtatgtactgagaaacggtttggggtgaaatatatagagtttgaagccaacatgaaatattataggattttaaacaaatttcctctgaaaataagcaaaatatcaattttatttgaaatatacagctacagataaaaatctatttaataccatgtgatgctgtaagattgttttcattaacatcctcttgtatacattcttattcatactggagaagctgggaagaaataaaacgtgaaagataatacatatttttagttgttaccaaatattaataatggcctaaatcaatgaagttttagtgtaattacatacacaccctgtttttataatgattgcattgtgattttcattttcctaaccaataattgtgattagtcatttgattgttaccacaatttttctctacctaggagctaaagaacatattaaaatccttggaaacttagataaattactgtaatgaattacaaaattactagaggtgatgatgatcaagakaataataaagagtaattagagtaagctccacttcttcctcttttatagcagtccctttgtcttagagtaaaattaaaaaacagaagcaagataaactaactcctactagtcatgaatataactcatctcttctctcttcatatgtaggaataggcggtacctatctgggaatgggtccgcagaaacagtatatttaactmtctccaggcaattccctgacatttcagaactggtttctctaccgtttatctctctttgcctctatccccacctgcaatctgttgcttttctctttctttcaacccttacaaaaaaagcaaaaaaactacagattaataggaagatagtacctttacatagaaatattttcttggcccattataataaatgcatgtaaataaatatttttttcatactcatgagcgtgcttattaatggaaaattaggggacagtacttaaaattcctagaaaattcaagatttttaatataaatttgacttaaaacatgggggagaaggaatgctctttagaatgggtctgtacatccaatcttatttgataaattttctggtgtttcatttgtgatccttgttatgtttctttggcatctaataaagaatgataattcccttggtactgtcttagggaattatgacagaatttaggaagaagtttcagggcagtcttttaagaaatggaatccacagaggaataaatatgtctttaaacttcttcagtgaagtgattccccattccacccccgtttcctaaaaactgttgcaagtgcatccctagctttagtatttaaaagatactcactatgataagtttgcataaagaaatatttacttttaaattcttacaaatctgttttttttaacaggtcccattaagttctgaaatagtttccttaattcctcctgtgtgagaaacctgtggcatgttttaatcactttaaacaatttttttccctccagaagaaatgatttattccctatttcctggtttatttcaaagcaggtacagctcttggatctgagggttgctaataggttttgaagctaactgcaaagccatcagcattctacttcctgctatctgccagctgttgaggactttgtctccacaaacaaaggagtgcaggttgaaccctcctttccatctcaattattgcagaacaggcttccctcccaagtcctctgcatttatcatccctcttccttctctttctttgttctatagcatttgaattgtataaaaacgaaattatatttggaccaaggcaaagtgctttttaatgagacagtttatttgtgcttccgtgatgttttttctcgttatgtgtgagctcaaacaacagaacacattcctattgaaattaagggtcataatcctgatattgaagtcttcattagctgctttgcatcctcggtagcatatgttgtagtttgatctgctctgatgatggaaatttaagggttttgttatcagtttatttattttaaattgcaagctgtagcttaatagctacataactggctcttaataggtatcaggaacagaaatataaatttgaagcaaagcctttttttccccattctctcctactaatgctctgattttctattagaagaatcagaaagcagtccaatggcttttgttgactggaacccattttatagtttccagtaactgtagctgtctctgtcctgctgtggtagggagatgcatattgatattgaaaacctaacttggtgaacaaggacaaataattattatgccatttgcttgtttacattgtattatataatttttacagttttttgtgttgttttatttaatcctatgatagcagtcctgtgaatttgctctgtcatttgctaatattcctattttccctgtgagaaactgaggcttagggaggcgaactgaccaacttgtggtcataaggccaataatagggagagtagaatagagaaccaaggtctcaacttcttagatgctgtatctatagatttgacttcccttcttgggtctaaactgaaatccatttatctaagtctattagtaaggtagtctttgattttctgaagtatttagtcttcttattcattaartgagaattgggcaaggatgagctttgtggatcattttactttaaatatagttaaatctgtgtgtktttccatgctttagggaaacttttgcttgttagaaatccagtggagatcctaggaactctaaagcctcttcacttatttttcatgcccaaaacaaaaagattctgttttttgtttgctttttgagttgtggtctgttgcctaggctgtaatgcagtgctrtgaccatggttcactgcagccttgagctcctgggcataagccacactcctgccttagccccctgagtagctgggactacaggtatgtgccaccatgcccagccaagttttttattttttaaaagactggggtccccctatgttgcccagggtgctctcaaattcctgggctcacccaatcctcccaccttagccttccaaatcaagttagtgggactacagacatgagcctctcctcccagccaaaaagatgctttcaaaaagaagtacattcaactaccaaattttcagaccaaagcagaaacaagtatatagcttccctctttttcagtcttcccatttcaaaatgtaaatatatacaaaagaaaaaatgaagggcaaaaactctggaagtaggctttgcaaaaatatctctcaagttaatttgaccttttgctcacaaatactcatggctgaaatggctgcagtgtgcaacagacctgggctaagtatatacattcttagaaaaatgccagggatgttcctaaatattttcttcaattatctatggaactccttggaccatgttttagaaaatgattttaattttctttgcaggattatcataattgaaaaggtcacaggaatcagctccattcctaatgcatttgtacttgccaaagctcagtcatggggaatctttttggttttcatattcaatacttttctttttgctttgttgtatgataagggagaaaaacagggttggcatgaaggggaagtgaatcaggtgccaactttttttgttgttcctcagctctgatctttgctttccctgagccttgtcatctgtcagggaaaggaagagtgcaactacactaagggtttgaaaaatgaatcgatcattctatactttcagaaaacatattcagtaatctttaaagtaccattctcatgtaggcgatagcttcaaggttccagcataacatatgcatagtgaaatgttttaatcttttattttatgcttttcagcattttagaaagcatcttttgtgttcattttccatggtgctgtgactttttttttttttttttttgcttagtacagctagttgagtggtataaatttcttaagataataaaaccatggctttcttttatttcattcttagataggatagttttaaaacatttaatattattaaatatcgctaagatagagtaagtacagtagccattcacctatactgtacattaatacttaagggctttattatctgacatttcatgacttggtttagttctggaaaaaacctgaggaactcattaagaaagggagggagtgtccaataaagtttgtatttgttgctgatacacaaattctttttttttttttttttttgagacggagtctcgcttggtgccaggctggagtgcagtggtacaatctcggctcactgccacctccgcctccaaggctcaagcgattttcctgcctcagcctcccaagtatctgaggttacaggcatgtaccaccattcctggctgattttttttattattattatttttagtagagatggagtttcaccatgttggccaggctactctcatactcctgacctcaggtgatccacccgcctcggcctcccaaagtactgggattataggcataagccaccatgcccggcccacaaattcttaatttctacctgcctctaaccagctgcttctcccagaaaaattcagtattttcaaagccagagcttttcctaaaataataggtagagacatcttcagtttttatgtgggtagttacattaggcaccaagaagcaataacagtggaaaactgcaaaccgaatgcaagtatggggcagtttcttaatttggggtcagtggagcgctttgtggaatcaagtacaatcttgtgatcttgggtggcctgcctcactgtggtcaaacataaaacaggaataaaagtttctatttcacaggattctaagaggattaaacaagatagtttatgtgaagacactcatcaaggtccctgtcttctgataattaaacgtgaattcagtgtggatccctgtttatgttactgggatgtaagctgaaaggagttaggtaggaggctgttagcagtcacttggtatatttcacttgaacctgttccagtcgcaacacaccatggtaggtgtaaatatgggcatttctcaactggtttaggtcatgtaggaaataggtgctatcatcagattaaccaaaaaaaaaaaaaaaaaaatggaaaaacaaaacctgttaatattcacaatttttaaggatatggagaaataaacagttccatactctgggaagccagtctgtgcatacccttcaacctagtaattctatttttgaaaactcttggtgctttttcataaagaaatatgatctaggatttgtaagagtgaaaatggagtatcaatatattttagtcaccatgggaatgatgaataaatgttggtatatccaaagtgtggaatgctagtacttaaagtggatgaggtatgttccttatctgggactatctatctctgagatacatggttaattgaagggagaagtttataaaaccttatgattctacatatgcatgagactcctacccaaacacaaagcttgtatatgtgcatatgtagctaaatgcatagaaaaagatctgaaactgataataaagattgcttttggggaggaaagtggattaaaaggagtgataagggagtttttrtatttttctatatggtttgaattttttacagtgagaatattttcaaatattactgtataagtaaaaaaaaggaaataaaacactcaattgccttgcaaaacaagacaatagcatctaatagatggatacatgaacatatccattcacaaagaaaggcaactggtctctaaaaaatatgtgaatatgaactactgcttacagataaataattcattagaaaaacccattgtgccacagcacttcagttttcagtgatgcttaccttgaaattttaacagtgtttaagactgaaaagagaatagaaaaattctactggggatagaatggaagggtagtagtggggatttgaagcaaactgagagttgaagggtgctgttggcttgcttcattcatcattcctttatttatttgattctttcattcaacattttctgaggagsaagtctctggggacacagacccaaatgagrtgctatctttgtcctcaagggcctcatctagtatgtgtggcaaacacatagaaagtaaattactttttattgttacaatcasaggaattaaagcatgaacccagcaaggtcaaaccacttagaacaatggaattgatttgaaaatgaggtactagtcatggaaatggaaggctttctgaaagaagttgcattcaacttggatgttgaaagatagagaagatgcatttgggcagacagcaaactcatgggtcttgaggtgtgagaactacgtgcagcagaagagtatgtctgaggaattaaaagcagmcccagatagctagaagcaaaatacaagaagtcctctgggttttttagcaaaaggagctctagtctaacaataccctatgaaccctggagccaattgaacgctctagtgataaactgacctttattttttaaaattcaaacactgggaggatctccattgtgagtttttgctttttgcttccatttattgaaccttcctgtgagaactaacctgtttatgaaacatactacatcctctttaatcaaagcaagcatgacagctttctttctgttgtgatgtttttcaagcttccctttataaaattgacatcacagtggaccacacttgccattgagatcatgtaactgtagactgtcaatgatgttgctgtgtatgttcacattgaggttaagtctgagtctgtatacaatgtttccttcttgagtttctcaaacgtctgagaaggaaaacaatacttaaaagcatagatatggccgggcacggtggctcacgcctgtaatcctagcactttgggggctgaggccagcagatcacgaggtcaggagttcgagaccagcctggccatcacggtgaaaccctgcctctactaaaaaatacagaaattagctgggcttggttatgggtgcctgtaatcccagctactcaggaggttgaggcagaagaatcatttgaacccaggaggcggaggttgcagtgagccgagaccacgccattgcactcgagcctgggtgagagagtgagactctgtctcaaaaaaaaaaaaaacaacaaacaaaagcatagatatttaaaaatacatagaatctacttaacagagaaggattttgaccatggttgaaagatgcaatatgccatgttttagttgtttttggggagaggaagatgggaaaggacctttgaaatgatgtttgagtttggatgtgatttttgaatctctctcttaytccatgtaacgttgagaagttacaccttgttcgaaactgctcctgatgcwcttgggtcacctacgtagccccaggataaatttgtacttgggaaagtaggtatattaaaagtaaaaatattaactaactacagttatcctcgaatgtgatactaaaccatcattattaaacaacatctcaaagaaggattaaagtctaccagtcagtgtcctatcactaatacttctgtgtttctcctgagacacataatgaagcaagctctgaaggtgacatccaaacaaaggctggggaatgtaarctcagtttggatctttgagattaagaagagctatctcttcttcacagccctataggtcaatgggaaaatcttcaaaatcaattctttcagcagccaggaacatctgaaaggaaatcaaaacttgcttattatgctgacatggtttaacaccagctaagacttagaaatgaattttaaaatctaagctctggcaacaatacatttagcaaaatctcctgctcgagatatagcaatcataaactgtcatattccttacatataagccaacaatggtgttatatattcggtatcagaataatgaaataaagactatatgtgtatgtgcatgtattgtgtatggatatattgaatgcaattcagagaaaactcacaggtattaattattcattaattgtgttaatatgtgtaagtagttattcattatgttgacatatgtttaattcaaatgaaatccgttagtgttaactattcattaatactacagatatatacatgtaaggataatttcactttccawggcattaattattattattttttgttgtccctgtgctatgtacacagctttaattgtctggtctgatttaaaggatttgtgtaatgtgtcatcattggaatcctacttttatgctaggcactatcataggcactggaagcatgcaagtgaactggacagacaaggtcccaatgatctcagagcatgtattctagtatggggagtatattgataataagtgacttgtctgttaatctgttctcatgctgctaataaagatgtacctgagacgtaatttgtaaaggaaggaggtttaatggattcacagttccacgtggttggggaggcctcacactcatggcagaagataaaggagcaaaggcacatcttacatggcggcaggcaagatgtaagtacagggggcatgtacagggggactccccttcataaaaccatcagatcctgtgggacttactcactatcacragaacagcatgggaaagacctgcccccatgattcaattacctgccaccggstccctcccatgacacatgggaattatgggagctacaattcaagatgagttttgagtggggacacagccaaactatatcagcttatttttcaaaaggacttaagagaaaagatgatttcaaaaagtgataaggattatgragaaataatgaaagaaaataggtagagtggtaagggtgcagaggggtgggcaggaggagagcggggagggaaggtgctttaggtagcatggtggaggaggccctctctgaggagtttgttggagtggacacctgaaggagaaggagcccaacactgggcacatctggcacatcttggggaggagccctctaaggctgaaaagagcctgtctgaaggtcctatggtggcaaagggctggaaggcacgggatggctgttacagctgtttggcagttaatggacaaagctgggtactggataaaatcatggattgccaggcatcagtcagatcattaaataccttttgagccatacaagttcttaagattttactctctaagtgcagtcaggagtcattggggatttaatagttttttattataaaaatgttataagatatgaaaatagaaaagtatagtgactcccaatgtacccattgccgagtttcaataattatcagctcatggtctatcttattttacctatcccttctctccagctgcaccccttcccagtcaccaccactgcacagtgttatttgaaggaggcatgctgtcatttgtcaccatagatctctagaacatcagaactcttttaaaaactatagccatagtatcattatcacttctaaaagttgacagtatttccttagtgtcatcacatatccagtctcatttggagttgtacgcaggagagtgatattactacatttgcagctttaaaatgagctctctgttgtatatgacatggctttagaggggcaggagtggaagccaggagatcactcaggtctccttgtctgtgtttagcraacagaatggtcagaacaagggtgcttataytggagatggagatggagataagattttagctttgggatatscctggaggcagaactgacttgctgatcactactgagtctggcccaggaaacccagmgaatgtgggacgctaataattgagatggagaagacttgaggaggaagtcttgagggttggaagggaaaactaaggattccatttaatttcacctctgaaaatggaaaatccttaaaatcagccttcaatagaaaaagaggagacaaatgataacatgcatctgtacttaccaagacttcccttcagtcctgctcaatgatatatgttaagggggataagataatggaagaaattgctcctgttcttaaaaaatctcctaggtttacttgagatctatttagatccactcaagagaagcctttcactgagattgcttttaaagatgagtaaatctgaaaagtctggctgtccaaaaacacctccatcaccctaccatgtgtagagtgaccttatttttcccaacttgaaatatgatgcaggacttgaaaaatgagagtgttcttacagggacagtgtgcatgaacaaatgacatcagggctggcttgaaaaataatgtggcacataccatttctactacaagttcctattcaagaatgaactgaagagccttgtctttgagttggtgtgacatctgttattggcatgtataagttaatggatgattgttgctcatggttatctgctccagaaaaatgcccccttccctccttattttatgctccctgtctcctggaagcctcagccctatgkttaaggccttcagttgattaaatcaggtccacccaggataatctccctaacttaaagtcaaatgattagagacttgaattacatctgtaaaatcctttcacaggaatacctagattagtatgtaactgaataagtgggaactatagcctagccaattttacacatcaatgtgctcatctatttaatagggataataataatactttactgataagcttgtttgggggaattaaaggagtcaaggcacgtaaagcacttgacacataatatgtgctcaataaggattagttattctataaggcaggaaagcattaaatggctgccttgtggcgaagatctgtcaaaactagatggtgtcttgttcagtgataaaagctagacacaaaagagtgccacatatgtaagatgtggaaactgtcaaagttcaccagtggtgctagaagtcaggttgttggttacccttgagggtacctggaaggctgcggcaggtagactctgaggtgttggtaatactgtatttctggatctgggcgttggttacatgaaagtgttcagactgtaaaataattaattgaatttatatgtatatgtgtgtcagttatacttaaaaactgaagtactggatgatagataccaacttctattggatatgtgtgcgcttctgtgtatgtgtatgtgtacatatacacacatatatacacacatatatatctgcaaagaaggagaataatatatctgcaaagaaggagaaaaatttttcctcccatttcacaaatatgagcatggctcagaggcaagatggcagaggagctttattggcgtatttgaccaaacctcataagattattttatttccgagttgttgccactaccatgtctgctcacattagaatggttattgaaatattttaaggccaggagtggtggctcacgcctgtaatcactttgggaggtcaaggagggcagatcacttgaggccaaaagttcaagaccagcctggccaacatggcgaaacttcgtatctactaaaaatacaaaaattagccagacgtggtggtttatggctgtaatcccagctacttaggaggctcaggcaggagaattgcttgaacccaggatggggaggtcatagtcagccaagatcatgccactgcaatccatcctgagcagacagagtgagattcaatctcaraaacacaaataaacaaaaataatactattttgagaattctttggacaaaaaggcattctactcataaggctattaactcagagaccagagcaactgagttttccccaatgtcctgaacttttcttttcaagaccagtgaattgaatccatttcaaaactgagatgcagtgagcttacatgttcattatctgtttgcctatgctrtctgcgatttttaaaaataaggagtctcggaaagtgattttttttctggaaaatctttacaccagagcaatatgatcagataatgttatttttaaagtgtagataagaaattataatgtcatcttacaacttaggtgagcatttatagtagttccaggtattcacttggataccaaatctctttttaggatatgaaataaaatgttgcattttctcttattatttgactgtgaatgatgtgattttatatttagattagtgctgtcccttaaaactttctgcattgaaagacatgctcttttatctggtctgttcattatggcagccagtggccgcgtgtggctcttgtgaactagaaatgtggtggtgtgaactgaggaaccaaaattttaacgttattcaattttaatatatttaaatttagctacatgtggctagtggccacggtattgaacaacgagatttgaaatcttaagtaaaatatggtatttggcatagaggtgagtggccgattacacttaattcttgttatcttttttagagatagggtcttgtgctgttggccaggctggagtgcagtggcacaatcatagctcactgcagcctcaaagtcttgggctcaagctgtcctcctgccacagcctcttgagaagctgggattataggcgtgcatcaccatgcctggctaactttaaaaaagtccttttagagatatggacttgctttatttcccaggccagtcttcaatgcctggccatgatcctctcaccttggcctaccaaagtgctgggattatacgtaagtgtgagccacagcactcagtctcttaattattttcttagaaactctcaaaagttcatctacataatgttttttctcagcccagttactctggattttccctgataggaaagtccccttctaaagacagaaggttctgaattatatggtaaaaatatctacttttatacttttactgtgtacacctgttccttaatttccttaatccctgggcactgttgttcttctcccatcttgggtaatggcttgctttcttttctttctttcttttcttttctttttctttttttttttttctttttgatgatgtctcactcactttgttgctcaggctggagtacagtggcaggagctcagctcactgcaacctccgcctccctggttcaagtgattctcctgcctcagcctcccaagtagctgggattgcagatgctcaccaccacacctggctaatttttgtacttttggtagaggcagggtttcaccatgttgcccaggctggtctcaaactccttgcctcaagtaatctgcccaccttagcctcccaaagtactgcrattacaggcatgagccactgcaagtggccaggtaatgactttcttgagggcactgtccctgagtttctgcarcatagtaagaagtcagtaagcagttcgtacatatgctgggttattaatatgtgggtcaggaggcagtggtgtgtcactcaagagtgtgaggttccattctgacatttctcgaatctcacctctgccacttagtggctcagcaacttccttgccctttactgatgtttcttcatctctaaaatcagtaatgttctacgtattttatagaactattgtggggattacataagaataggaaaatttatgggatgctcatgtagggaaccagtccccttcattctgcagacaaaatgacttaagcttagagaccaggagtggctcttctcaaatcaaagaactggttggtatctaatattgttttattcaagggtctcgtaagaatatttttaaaacacgctataaattggcctttgtacctaaaagtcgtagcattatttagtcctctaatttccytgtgaggtatttgtcatttctcccattttatacatgtagaaacttaggcttagaaaagctgagaagcggtagggctgggatttgaacctggacaatctccatccagagccatggatgtgtgttttatttttttaaattttatctttttagtagatataattcacataccaaaaaaattcaccttttaacagtatgcaattcagtggcttttttagtgtattcccaaggtcatacaatcataactactcctgtctattaatagttccagaacattttcgtcttcccaaaagaaagccctgtgctggttaagaagtcaccctcattctcctatgcttaatgtccctggcaaccactaattttctttgctctgtgtctgtggatttgtctattctggacattttacataaatgggatcatacagtatgtcagagccagtggtttcatgccttactttatactccttccaataatgagataaaggtctkccgtacagtgggagttcaaaaattaaaagcttgtattattgttgttgttgccattatgaaggacagtctggagtgatagggtcatctgtttttatgtttattgtgaggcaagaggcttggaggaaaaagttaagtggtagtaaaagaaaaaggaaacctaataggtctccctcttgcaactatctccagctcccctgcagttcttaaaaaatgtccagtaattgctttttaaaatggttcactttttgataaaatccatcaagaaaaggaagcagaaatgaaaaacaataattaaccccaaatcagctctgtatgagtgtcagtacagcattccagaagttcttggagttggaagccatgtggggaatcagtcactttcattctacagatgagatgacataagcttagagaccgtaaatggctcttcccaaatcagagcactgactgatacctaatacttgtttttatccaatggccttgtaaaaatatttttaaacagtgatccatgatttacctaattggaggtaaatgtggtatagattaaatcagtgttcgttgattgttcatttcagccgtgttcttccttcttccaggaaatcactgaacagaagtaggtgaaaaaaayacaggtgtcacaaaatttgaagacagccctcaaattccaagggaaatgtaaataatgaaaacataacacacttgaatcaagctatttagctggccagattcaggaagctttcatttcttcacttcctctgacttgggtaatgaaaatattttcagaggtgggatggtggtccttcgggaatcccacctcacttgtagacagagttaaggtattagagttctgaaatgcatgccataaaatctaataatgtatgaaacaggcaaagatgttgattttattaagaatcttggtaaaagtcattttccaatgcagttctgtgaaactggtggggagagtttagkgattcctttgaatcaccggtggtcacagctcattgccccagcccatttttctaacaggtgttaggttatgtggtttaggccaggaagaaagcttactttggctttgttccattatacaaatggggagaattttgatttgctgcatacctctgagcccttgtagattttcccatcatcctaactgctagtttattgagattaagtgctttcttatgtcagtgcatggaaatgacttttgattttcctttaaattaaatttgattcatttactacgttaggtagatagatgttctagccagaggagaagataatggctcacattcacatagagaagtggcgtgacaatagagacaagatgggatatcagtgtccacagatagatgcgtgctccaaaaccagcacttctcaaggccatagggctgtatgattatttgcttctcattcttatccctagacacatccatgtgmccccataagtccccttcctgattctccctccttcctctatatctagtctcgagagacaaccaactgttgttttccctccatgcttcctttcagcctggacacgttcccagtttttcatttttccaaagtgctttaatcctgcaatcattgtgtgcagcaacagtaaaggcttagggtaaaggagagggattacagaacatgttagtatagtgcaggcaggcagtgttttttttttttttttttttttgagacggagtttcactcttgttgcccaggctggagtgcaatggtgcgatctcagctcaccgcaacctccgcctcccgggttcaagcggttctcctgcctcagcctcccgaatagctgggattacaggcatgcgccactatgcctggctaattttgtatttttagtagagacagggtttctccctgctggtcaggctggtcttgaactctctacctcaggtgggctgcctgcctcagcctcccaaagtgctgggattataggtgtgagccactgcgcccagccaacagtgctttttaattgaacagaagacagctctgttgtacaagtcctctggtccttcttcaccactgggaccttcttccccaaatggattcccctgagaccatttgttaacatctcctcaccctttctctccctgtggggctgtcccattgctgctctgctaaatagcttagtcccatgattcgtattatgttttataaacagagcgcccagcctcactrggtcccttcagcacaggcacccacagaaatgttgaaatgactgttttccctttggtatggtcacattcctggtcaggacttggtcctctgcagttctgtagatctgctgagggaagtgcaaaagtggagagagaatgctgtattctgtctcagccccaaataagctgtcctgaggtcatctatttgctcccctgtccgtctgttatcttcagttacaatgcagttttgatgatcccaaagtcgctgttttaagagggcaagttttgmattaaatgcttatttactgttgctctggtatttaacagaacagcctgttgagaagtaagcgtctactcaaatctcccttctgattttaaacttcagccatcaggagccacacaacctactcacaccattctgcgtgcagactgtcttgtatctgccctgtcttttccctcttcctgggaggttctctcaactctctcccatccctaatacccagacatttatacctagataatacctcctagtcctttagccctgtttctaaactttctcctgttctccaggtacagatactctgtcttctttcctccagcacttggtgtatcattgatctcacaactctcaaattttctgttccattggcaggacagtaagagtttgcctgcaaaatgaggatatcaaaagaatattgagttcagttggtcagcatgtagttaaccacgtcactggataaagtatctaatcaggtatctagggatacaaagatgagtggagactcaggcctgccacagaggcatggcatatatggtctgtgaactattaaagttggcatgtgataatttctgtaagagagacgaacacaaaatgctatgaaggacttagtaatgacgaaattctacctagcttggggggaagacttcttagcaagcattactccagtactgatttaaaatcggaaaatcctggctgggcgtggtggctcattcctgtaatcccagcactttgggaggcctaggcaaacagatcccttgaggtcaggagttcgagaccagtctggccaaaatggtgaaaccccgtctctactaaaaatacaaaaattagccaggcatggtggtgcatgcctgtaatcccagctattcaagaggctgaggcaagagaattgcttgaacctgggagccggagttttcagccaagaccacacactgcactccagcttgggtgrcagagcaagaccctgtcaaataaaataaaataaaataaaataaaataaaataaawtaaaaatcctggtgagagataaaaaggagaataaggcacatccctgccctcatggagattatgktttgggtggacatatmatttgttgtccaaaagaggatgctttagagagggataatcagtacgtcaggcagctccggtgaactgggccttcatgggtaccctcatggatggcttaggagggatatgagcataaggagaaactttgtgaggggaacatttcgaagattccttgaagaacaagtgaaagacatacaggagcagattatatgtcttgaaaggaagcatctcccttcttgaattcttttcacaactcaagttaattatcttctgtttctcttttactgtaaaaatctatctactgccttttatttgccatcattttgcatcaggatcaggttgggacagttttcacaagagggatagtgggtagtgggtctttagagtacggactctggaaccaggaagaatggattctcctctgtgaacctcagtgctgtcttctggaagatagcggaagggggataaaatcggtactcctccacagggaggtttgctcgtttttgtttgttttttacgaaataaatttgttgagaggctttggtgtggagactgataggaactcaataaaagtttgctattattgttaatgtttaagttatatatagttcacactatatggaggggaggaggaaacatacaagtttgtttcaaagctactagagttcagttgctttaacctgaggatcaagcaccacgaccaagaattgagagagaacaggacgcagcacgggcacagaattaacttgactccgctttgagaatgaggagatgagacttgtgggccagaaccaagtcagccatggagtgactgtgaccattgtgctaagggttactgaaggggagaaaaacccagggtcctattgtaggtggtgaaatccaaaggttcagagaataaccagtggtgctaagaaagcaattagcacctgtatgtaggaatgaagacttggcagggggctttggaagaagcccatggcagcctataattatgaaaataaaagtctaatggtataaaaactagcaacacttaaaaatcactgagtaatgaaaagaaggctcagcttgttttcagtagggtttctcaacaagcttgttacttgggaatattgaagggaagstgggtgtgtgcagtttttagattagtaaataaaataagtaaataaaagctctcggattaccaccttaggaaagaagtatattgtaaaacaaagcatggatcgcttacgtgttgcaaagatgatgtatgattcagcggttccaagaatggatctggtgcccagatggacctgmatttgaacacgacttctgccttttgctagctatgtgaccttgtcctattgacttaagctccctgtacctgggtcctcccctgcaaaatacattatatgaatacctcctcaaaggggtattgtaataaataaagcacagagcatgacaccactgagtgcctagtaaaagttaggagccctccagggactctgcaatgtcattctgcctgaggggagcctctatccctggaagaaagtcttccttcatctctgatccagttttcccaaatgttggaggagactattgtagatggaaaaatacgtgtaaatgcatacgtatgggtatgtgttttaatagtcaaggagtaattgtaatgtaattcaggaaaaactagtcctagcaaactctttatcctaaagttattactgttaggctggtgcaaaagtaattgaggtttttgccattactttttgtttttgagatggagtctcgctctttcacccaggctggagtgcagtggtacgatcttgtctcactgcaacctctgcctcccgagttcaagcagttctcctgcctcagcctcctgagtagctgggattacaggcgtgtgccaccacaccatagcaggtcctattttcttgtcctcctttagtcaaaccatcagcatagtgtctgctactgaagttatatttaaaggtggtaggaaatgttatttaaaataatattttaacccagctaatttttgtatttttagtagagayggggtttcatcatgttggccaggctggtctcgaactcctgacctcgtgatccacccgcctcaacctccgaaagtgctgggattacaggcgtgagccaccctgcctggcctttgccattacttttaatggcaagaaccacaattaattttgcaccaacctaatgcttagtgtgaggctattgtaaaaaggtgaaaagagcattgagtgaaagttggtacctgtaatacacagaagtggcagaaaccataccagagagcaggtgaatgactgaagttgaagaacagggaggggagggtagaagaatataatttcttctcgagagcttatactttttctgccctagtaagagggactaggacttgaatcctggctcagaatgaatgaatgaatgaatgaatgaatgcatgaataaataaataagagagaatgatttcctgtgttgttagatggaatttcaaagagttgatttgaatacattcccaagttgagctcccttgattgtctcctggatggaaatgcttaactagcaggttcgtttgtccatgcccaataatttttgagcacttactgcctaccagtatctgttccacgtactggggaggtgataataggaaagatagataaggccgtgctcctaatggaatgcgaatttctgtgtgtgtgcatacccacatttatatagggatagttgataagaaatcatgctgaaaaaacaactaatttcactctactaggcctaattaaaaaaaaaattaaataggacagcgatagagaattgggaaaaaatggttgctacagataggatagtctctgaggagatcaattttaggcagaattctgaagaagkagaaggagccagtcattaaaagatstatgggaagggtattccaggctgagggtccatgaaatgctaaaagtgtggaatgactggaatgactatgagctgggattacaggtgtgcgccgtgtttcaggtttagtaatgagaatggtacaaacagaagttgcagagataagtaggcagccaccgcatgaaggagccttgtgggaaatgaccagaagtttgcattttattcttagtacatattgaagccactggagtacttttagctgaagagtaatgtgatacgatctgatattttcacagatgyctrtagttgctgactggagaatgggctgtaggaggatggatagaggcaggcatctctgttaagggaacccttgtagtagcttaagcaggtggtactggggagacactggccttcctgttgtactgaactgctgttctcctggtgaagttgtctactattatgagttgttctgcttgtctaaaacaaaaggaaaaaaacgttctgaaaacagaactatctgttgattataacatatgccatgttagttgwtgaaaaaggaagaaaactagacatagcagttactcagaactacttttaggagatattttgctttccatttagcatttgggaccagctgaatacacagttacatgattcttgtgagctgtagggcacattaagaataatgagactagctaaatgctttaggcattataaagccatcatataccaaatgtgttattgttaattcatgttgctagcccacccttttaatagccgccaggagccataatgacacatgctgtgaatatatattaaaacaatccccacacgttgctctagtgtattgggtaattagatatttctctgtatgcagaaaggcttggatgcagctagatggaaatggcatcgactgtggcttttcttttctaatactgctgtgaagaaatgaatgtcggctctaaatgtataatctgtgcttcctcagtctgtgmtccatcctggaaaacaagatttttggtgccatgatccctgaatttttgttgccaccatgcatgaatttgagcaggtcctattttcttgtcctcctttagccaaaccatcaacacagtgtctgctactgaagttatatttaaaggtggtaggaaatgttatttaaaataaaatttgtgcttaattttttctgctgaatattaaaaaatactgtataccataataaataatttgaattcatcttagaaattatataaatcatttaaaataaaagttgaaacatagtatgaatgctattatgaatgctattatgtcagttgatttattttttttaataattaatatctcttgggcattatttccataatttgaggaatataactttaataataaccctttgggcttgcctaaatttaacttaggtggggacaggcaggccttgaaaatgagtgaagggaggtagataggaaatatattcaggccagagcatttatacccagttttatcaggtctgatttttgacacctgaatttttacataaaatgttcccaaaaccaaacatttttaagttacatttctaaattattcaggcccatttaggactagaggcctccactttgtctctgatatggatctaccttattattgtttttcatctaattacctattgatagaaatttagatctaaaattcatgtttagcctctatcctgacttgtaattctttgccactttcttgccaaaataagcttttgtatcarggggactgatgtccatgagccactccaaaggattttcctcggctgcaagtacagagaaacaaaaatatgagcagtaattgcaagttgactgaaatatttacaactcacgtaaggcagatccaggttgagtagcgtctgaatcttatgcaatttttatcctctttaggataaagcctacacaattataaccacacatttagatacaagatcttagaaggggtgttagcctaagaagccctaaagcttttacttcattagcttctgggtgaggacaagaagaaatggagtgaggagaacaaagctttgaggagaaacagatagtttattttcccaagattaatgaagggggacagggaagtatcactgacatcattaacatttcaacaaaagtaaacatattctgtcagatgaacttacagccctctgtctgtttaattatatattttaaattgatgtttctctaaaattctgactatgttcaaagttcgttactcaataataagtttacattttaatcaggaggatgtcagacccaataactcaattcattttgagaatacaaactaccttttgtttaacataaatatgttgactttgggtagaattttctcagttactggagactcccaacttttattatttataatacttgttacacagatgaaatagatattgaacaaagtatagggctattacaaagcaaagatttcacagcattagctttccaagagtccagtggcctaggaacgttagtatttcatgttgaatgtccacagaaggattacgaggggcagaaacccagaatttgccagaaaaatcttcaggagcaatgaaaacccaaaataagcaaagccagatgcagtaggaaattagataatttgtgaacaaaatgagagtaatgtgggtagatagaccctgggtaaataaacaatattaacttctaaattatttgattcagccttggttaaaatggtagtaaaattcagtgatttccagtttcaccagtgcttcatgagagcctttgaagaagttctaggaaagaatattggaagaatacaaagcattgactgggtggcccttacctttgtttagaagcaggataagaaaggttaatttatatatgtatgtatatatgtatgtatgtatgtatgtatgtdggcagtatagagttaagagctcagaccctggattcaaacctcatttatgtcacttacttagctgtcagatgcagggtaagttacatatccttgggctaataataatagtaactaaggctgatttctaagctcttagaaaagtaccatatatgggtttgttgatatcacagtcatcatgactgtaattagtattgagcacatattcaccatcttgtcattgcaaaattgttagtcttctgttaagaacttttctgtaagatcgaaaggtttgttttaattatgattttcaagaatctttgccttgaaagtttaaaggccatatgtgtttgttattaaagataacatttgttagaatgctttcaaagaaaaaattgttcatttaaagctgtaaactatgtttgtcatggcaagttgaactttcttatcaactgttttataattgacacattgcttatgacctagctgtacaatcctgttataattctcttagcagtatataagaattaagcattttctttctaaggtagcaacattacttgaaagctttgtttcctacataaaatatatttaactacaattttaagtattcctaaaggatttaaaatgtagtatctcattctttcacaagccatagtttaatttcttattcagtggttcttaaacttttcgatctcagaatccctttatactcctaaaaaagattgacgaccgaaagaagttttgtttatgttgttaaatctattgatatttgccatattagaaattaaaatttttttaaaataatactttaaaacaataataaacattttgcacattaagataacatttttaaacaagaattaacaatttttcaaaaccaaaaattgagaatggcattgctttatagttttgcaaatctctttaatgtctgacttaatatgttaattaaatacagttgttaaaagtgctgctaagaaaaattccatgatcccatgagagatataaaaggatacataacatattgcagttgattgcagagtaattccttgaggaagtgacatataaattgagatctgaaccatgggcaggagggagccaggcaaagagaaaagtgctaaagcagaccttaggaatgggagaaatttgatgcatttggataatggagggaaggccagtgtggtttgaatatgttgagtgaggggaagacaggctcctgatgaagccagagagaagctgggaccagagttatgcaaagctttagggtccatgtggactagcgtaggttttattctacaaggaagggggaccactgattggatttagaaagggggtgttagggtgatatgacccaatttgcacttcaataaaatatcactggctgcttatggagaatagactgaagtagtgggagaatggatataggaaaacagtttaagaaaccagtgtagcagaatatgcaagagatgatacatatttaggaagcagcacaaagtggaactggtgattgatgggatatgggcgatgagctcaaggaaagtgactcatgttttgtcttttcttcgactcatctgtcttcatctaacacacatgtttttgttcttaaatctagtaaaaaaacatcaaattaggccatgaagcagaaatcctatgtttgagctatgggcttggatttgttgtcattacctgagtagaaatttaggaagcttgtaattgtgtattctttcagaatcatcgcattttaacattctgtatcattttacagatgtcacaaaattggacttttaaaagaaaattattcaacatgctaatgctttaatatagccattacttgaactagtatttgtgtagctggtgaaactatcacacttctcctccttttgctcatttttatattctcggagctgggtagttggataaaatggaatctgtccatcataacagtagccatcctgagtatccagatgtcagggagtttctgccaggaagggaagacagctgtttggaatgggaagggagtagaggatactgcaaaacatgtcaagagttttatcaggggagtgagatgacagttggtagcaggaaagggtaagcagacactggaacatgtctggaaaaatcaattttgtttgtggcttaggtgatagcctaagacatttaaaaatgctctgttatggaaccctgcatttgtctggattatctatccaaccagccttgtttaagtgcgagctataggattagcagatagtaaacatactctaagcagtcagcttagagtagagtatttcagctcagtattaggtagacagtaaaatgaatcattttctaaatggtttgtgagcatttttgcctataactttaatatatttgggacattcaaatattctctcttaccccagtgaagaaatagaacatgacctgtcactgttaaaaataacttcagacaggtaatgaaataaaacgtcttctgggttttagctttttcactgaattggtattttagttttagctcttatctgtattagtatttgacgcttatctcggaaacaaacaaacagatctgactcttagaattgcatgcagctgtcctagactgtctttagatcagtcttctaagattatcccagcaaacttcttcaaattgtcacagtttctatataaattctctgtttttgaaatgtattaaaacctaatgtagtatgcagtcttgtgggcaactggccagcactgcttctctttcatggtcaaagcttttggctggcattctgaaatacagtttcagtgttgatccccctttgatcactgtggaccagagtgaaaaatactttcttattgccatcttgacctacaaagatgtgcttgatatggggtgtgttcattttactgtaattacatrtgccaaatacttggagtgtatgtctttatttatcatggtaactgactaggcctttaaaaagtcatttacttttggaaaatagattcaaaattaatccaaaaattattcttcttaagtgtaaagtctttaagtgttctctcatagattattggaaatttygtgttaccaagcccaggctctgtacatgttttgtgtacggaagggaagagtaattatgtagaataagtgttaactattatttgctcttcattctgaatgttgtcaaccaaggtgattgctaaagctattcattttaattaagtagcctattgcaggcatttattagacagactcattgatatttcaacagaggcataggtagatatttcttctatccacatttgatgcttctgtgccattttattttattttattttattttttgagatggagtaccactctgtcacccaggctggactgcagtggcgcgatcttggctcactgcaaactccgcctcccaggttcaagtgattctcctgccttagcctccctagtagctgggattacaggcgtgatctctgctcactgtgacctctgcctcycaggttcaagtgattctcctgcctcagcctccctagtagctgggattacaggtgtgcaccaccatgcctagctartttttgtatttttagtttcaccatattggccaggctggtctcgaagtcctgacctcatgatccacttgccttggcctcccaacgtgctgggattacagctgtgagccaccaggcccagcctattttttttaattgaatgaattacttttatcttattttattttagattccaggggtgtgcatccaggcttgttacacgggtaaactgagtgtcgctgaagcttggtggatgaatgatcctgtcacccaggtagtgagtatcgtacatgattggcaggctttgaatccatgtgcccctcctcatctccctcctcaagcagtcctcagtgtctcttgttcccatctttgtgtctatatgtattcaatgtttagctcccacttayaagtgagagggtgttgtatttggtttcctgttcctgtgttagtttgcttaggataatggcctccagctgcatccacgttgctgcaaaggacataatttcattcttttttttacagctgcatagtattctrtggtatatatgtaccacattttctttatccagttcactgttgatgggcatcttggttgattccgtgtctttgctattgtgaatagtactgcaatgaacataggagtgtacatgtctttttggcagaaagatttattttcctttggttatatacccagtagtgggattgctggtttaaatggtaattctgttattaagatctttgagaaatttccacactgctttccacagtgagtgaactaatttacattcctaccagcagtatgtaagtgttccctttactctgtcgcctcaccagcatggtgtggcttttagaggttttgacagttcagggaggctcttcagaattctaaaattctgataagcacggcctaaatatttatgtgtagtctaagaactcaagcatagaatactatgcttttttagttttagttttttttaaaaagctttcctttgtaaaatcaaattaagaaaggcagcctggtgaagtaaaaggatagctgtgttgaaatttaaatgacagcaagtttaggatctgtatttagaaactatttcatctttagtataatgaggtgattagactaatacaatttgttgsttgtttgtaagttttttagtttggcagtacaattgctttttcaaaaaaatgaaaaatatgaaactctcaaataagaaagaggatgaaatcttggaccttctgtttgtagtgagggtagggcctggaatcgtatctacttagcttcccattgcgctagtcacgaccaccctctgaacctcttattacatgagattattctgcatgacacctatgttccacacaccacggttgcaggatctgtaggctacctgaaccatcccatttttcacatataaaaatcttcagtaagtatgttaaatgctttccatttatgacttagagataggagatgtagataggcatgctttctaaggatatcattttcaaattgacatgtccttgttcctcttatgctcctgatactctgaatagttttcatctgctaattaggtgatcacaatcaggtaatggaatattgaaggaatgtatttgcaatctgtgaaaataattcactgatgatgtctacaataaaaattctggtttccatctgtttaattatggggcatatatttaggagatgttatggtaaagtgtggagaaggccaaaaatatttgagaggccatgcccttggaggaaaaatagtcttattggaaggatagtgggaaaaatctgttgttgggattcattggaaaactgctccttccccatcctgtatggttgtggtggaaatggccagtgtagtggcctgtgggagcttgacttgggtctgtccaatgtctgaatcacaggaatatgccccagcgattgttccaggaagctgaagcatctcccatgtagctgtcagtaagattgcttcggtgaaatctgatctatgtagagagacgacttgacacaaaaaagctgtgggtttgggatttcagagtctgctcatggaagaagaatatgaggccaaaagctgatcagagacaaacagaattgggagacggaaagaagcagatggggggagagagagcaagaaagggtatgtgccttgatccagatttgtctcatgttctctctatcattggaatacctagttatataagccaattaattctctttctagttgaggctagtttgatttgtgttcttgtcatcgtcagccaaggaatcttgaataatcaacgcaataaaccaatgaagctaccataaagtactaggtactttgagagggacacagatccctctcttgcttttctttcaggtggcatgaaagcatctcagtattaaacattcactgggcactaggctgatggcttctggagttagcaaaatccctgagatagacagctgctccacttggaacatcctcaggaacaaacccggatttgctggtttcttagaaaatcattagygcccaggattgctccgccatgtcctttttctttgtctattctgaattctcacatcttccatttcatcttgtttttctcatatcctgtcccaggcccagtattatttcctgtcctctgtcccagtgatatttcatatgcsttgcaaaccatatttattttcccaaactaaataatattcctctccccatagattttttcttatcttactaattcattagattgttattttagtgcttaaacaacacttagttgtcttcagagatatttctgtttacttatatgtctcccgttatgtgaaagagatatgtgttttggagaaaataccttatattatcccaaaatagatattagtattatttcaagaggtgtgttctatctgaagctctattacagacaagggagtcttctggtgctttgaggtctgctgtcatgtacattagctaaactttttaaatccaacaaataccctaacgtttttatactaagttgtttttaattctttctaccaaagcataccacttggcgtcctggctgcatgtccctatgttgggagtgcctcagaggcttattttctgaaaataagggtgtgactggagccagtccttgttttaaacaggctccataccttaaattggttttcactgggagccttaaaattcatattgatgagtgaaagctagaaatacaatgcaagtttgaggagaagtgttttctgccaagtgactgcaaggagccagcagcttaaaacaagtaggtaggaaagaatgtgaggtccgatgctgggcgtgagcagacttggccacagtcaattaggaagaatttaacctagtgtactattatctcaaatcagaaatgtgatcgatgcatgagaacatgctatccaaataagtttacgtgtgtatatgcatgtaaatgtactttaatatgtatatattggcctcatcatatgaaaagcgaacattaaaaagatgtcatgacaataactttagaaacagaagcctggagaaccagctaaggcaacttgtaggctcatctttgggagagtggttttccccagtcmgaatgccttaccccattgatctcacatcyttatttcrtttcaaccatactctccttccccaacaaaacctcagcacttaatgataccatcataattctttgatttattcacagtacatgcacaagagtctcagaatatcgataccagtcctactacaaataatttaattaccatgagcagtttagagttttcctttaaattgttatgtatcttaaataaaatcgctagaaatagcacctctgtgagtgcttatgatagcaactggatatgaaattaggtttattttactttcaatttatagagattgcttttttagatttaattttgcattataattatgtagaatatttatgatttcagaatcaatctataaaaccagtatgttcaaagtagtataacttctatatctcccttatactctgtttcttcctcccccaaatttttaatacttactctgtttattaaatacaaatacaatatatacataaggttgcatatatgtgtttgtatgtggatatacatacaygtatgtatataaatacatttatatttgtgttccatcctttctttgaaaagttatatatactctatacatttttcttcaactttctttcgttctttagaaaaatagcctggagagcatttagttgcactttctagaatgatttcttttcttctttttcctcttcctcctctyctttttttttttttttttttacggttttatagtactccatcatgggggatgtaccatgyttttttctcactccatcccctatttataaacatttttattttcaatctcttgttattttaaataatgctgcagtgaattgctttgtgcaaacatatattttatctttgctagtgtgtcttttggatagactcccagaagtgcaattctgtgtcaaaggataaatacatatgtaattttgctaggtattgatgaacacttatccatagggtttgcatatgtmtctttgtatttataccacaactatataagaattcctagttccctaagtctggccaacatactatattgttgaactttaagactttcctgtcagataggtgaggaatgttatattagtattgttttcgattgcatttgtcatattaacagcacagtccagtgtattttcttatgtttaaggcccatttgcatttatttatgagctaatcagttcatatttctcactcatttttcagtgtgattttgggctgtttttttcctgattttgcagccctttgtatattggggatttttatctctagtgaagcttaccaatgtgttctcccaatttgtttctggaatcttttatgtaatcactggtatccatgtttttccttattactttgggattttaaataattgttagaaaagttttccccattcctaggttattgagatgacatattaccatgtttttttctagtccttaattttagttttcatagttaaatagttgatccatttggaatttatcctggtttaaagtctaaggaatggatctgattttacctttcttcatgtgactatccacttatcccaacagttcatatcaaaactccatcttctccccagtgatttaaggatagcatatttatcatataccaaattctccattcacttgggtttatcttttacctctttttggaaagagtgaagaaacttttttttggtttttgtttttgtgttttttggattgatacttaattttttattttaagttctgggatacatgcgcagaacgtgcaggtttgttacataggtatacgtgtgccatggtggtttgctgcacctattgacccatcctctaggttccctccccacacaccctccacccccaacaggccctgttgtgtgttgttcccctccctgtgtccttgtgttctcattgttcaactcccscttatgagtgagaacatgcggtatttggtgttctgttcctgtgttagtttgctgaggatgatggcttccagcttcatccatgtccctgcaaatgacatgatctcattcctttttatggctgtgtactattccatggtgtatatgtaccacattttcttgatccagttcatcattgatgggcatttagattggttccatgtctttttcaaaagccctattgaatggtttttcactcactttccttgttggctgaaactgggtcacacaactttcctaaacaaacaaatcctttgcagagggaatgagatttttactattggctcaacagagttcttggctctggaagatgggtggattgtctggaccaaatcaggagtaggaatgtaagaaagatggtgagatggtgagaggaagagattgagaggagtatcacatagtgaatgacacatttgtatgtctttctggaccataagcttcttaaggtcacagggttctaacagatcatcatgtcatcatgtcatcatctccctagccactgttacagtgcctagacgtaatatagctgtgcacatacttgccgaagagcactgagttggaatactactaaatgtggctttayactaaactaaataaaccaagtagtttggtttgttgtgtttcaccatatagttacagtatagctgaaataacatattaaaaatatgttaatcactaggttcataaggcctgaatacattgggtaaatgttttggcatttgttttttaggttctattttgaaatttgaatgatgtatttagagtacccttattctgggacttccggtatatttgataaatattctttatgtctgagtcgaagtggacagaaagcaagtagactataaatgtccttaaaggcaaaaccagtgtgttctctgtcaccccaatgccacctagttctgtacctgaaatattgtggatgttctcttgatatttatcaaatgaatgagtgaatgaatgatatctccattttacaggtagtcatggaracttagagctaaatggctctctgatgtcattcacctacaaaaaaggtctaaaatttttgcccacacagaaatcgattgcctgtcctggtgattattttctttcatattctcagagctatacttttatagtctgcaaacacagaattatactattgagaaaccaagcttttgtagaaaataataaccaatgctttgaaatgaggattatttcttagcaaatactgaaaatacatatgttggatatgaaagaatgagttggttcctaacatgggactaatgcagaaaaggggctaaatgctaagtgtaaatttaaaattactcaccatattggcctttgccttaacttcttttctcataatgtgggcatttaggattttcaacttctcagccatcctagaaaagtttgacttttatrtgatgcttaaatgtcaatatctaatttcagaaaatgaatttacaatttggggggaggtgatttcagagtacactttgccyacctctgatttggcaraggatcaagaaaatttgtcragttctgaaagcctgcatcttttaataagcttcttcaataaaaatgtgattaaaatgtttcataaggttaargtgttgcctgtggcagtggaaatttcctcagcttaacacgtcatcagtatgacatatcacgcttgcytttgtcagcagttcttgtacacagaaaaagtgtaaacacatttaaaatgacagatttaaatgtatcccaatagtagaggaaccactggtaataggtcataagtaaagtgtttctaataaaagcattgctgtcaagtactaastgaatcaggttggttgcctcattgtttgttggatatctatactcttgtctcatgcagtttgctcttaccagctcctcaccttcctgagctgtaaaatttaatctagtaagagattacattccaaattgcatgaagaaaatttcaaatttatctgcagaaatgatgcagcctctcttctaagaatacrttacccctaccatgtccttaccaaccagtatcttgagttttcatgttttgtaagcctatagatttttcacacattctcatgacaatgccctaaaacatatcagaatgacctttttatagaaacaatgagtggaactcacatacgaattctataggtttctgactttttaaaaagcaaatcatagcatttttattgagtgtcacggtagtcacatacgttgttctcatcaccgccatattaaatagtatgatttgtcggcggggggactgtggggtggtgattctaaattcgctttatactcttagtgcagctggatctaagaaaaacattttaaagtttatcagaaactyagtataattcagaacaaacaggattaggtttggaaaaaaaatacagatatagtaagaaaagtgacccatatagaagcctttcgaggtctgttggaaggccattattgaaaggaaggaaaggtgtaggttgtcagtggtggctgattgctgaatgactggacacgattgttgagatggctgtcttatattttgtatatcaaaataaaactttctagaaattttcttaactaaaagtaaatattctaatttctaaatttttatattgactttttcccctctttttttctggatgtttattggtacagagacacacacacacacacgcacactgacacactccctacttatttaacacatttgaaatagcactttgctggatgaggaagtacrtatggtcttcctaggagtgttctgagacttttttcaaatggtttttcctttatcccatatctctaaagatcactttcatcccacttagttgtgtatgtatgttttcamacacatatatccttttgaggtgggtctagtgggaggtatctatttttactctttaccgaggtaagggtttcsatgaaacaatgcaaatatatgtgaaattaaactagaatagtaattgcaactggagcgaactaaaaagtacagtggacaccaaattaaattaataaaagtacgtggtgtggggatttttaaagggcagcctcttttattattacacacacacacmttcagcaatgtactctattgaaatagcctgtccacttagaaatgcttaccgagttggcattttctttaaacaggataatttaatggtagaaccgtccacctsttttgcattctttaaataattaagctaatcatacaaggggtcctgcattccgtgattgataaattcgttttggtgcagcccttgcctctttcatgccttagagagcttagctgtgatgcattaggtttaattcttatagtcttgtgttttttttctggcatgttaagtcaaaacaaaagaaaaaaaytgtgcttttggcaataaatcgtggcctgctgggaaagtcaacatctacccagatttgccaggtggctattcagaaactctcataaccctgaagtctgaaagagctcctttacatctgaagctcagatacacagaataacttacatagggtgtgttggactatggttttcttatcataagtactggatcttagaagagcaaagggagaaatatggtgccctcttgattttaatagcagcaagaacaagaaaatcaagggagaaattactggaagatcatctacctgggctcatttttaagtgttataattattattattattattattatttatttttttttttttttgagacggagtctcgctgtgtcgcccaggctggagtgcagtggctcaatctcggctcactgcaagctccgcctcccgggttcacgccattctcctgcctcagccttcccagtagctgggactataggtgcctgcaaccacgcccggctaatttttttatttttttatttttttttatttttgtatttttagtagagacggggtttcaccgtgttagccaggatggtctcaatcacctgacctcatgatctgcccccctcggcctcccaaaatgctgggattacaggcgtgagccaccgcgcccagccttragtgttatttttaagacataaagtaagttttaaaaacacaatttcaccraaaatgcataaatatgaccatgaaattcaagaatacacatacgtattcatatatgtaaatgtatgtatgtgtatttctgaactttgcgtcattttgttcccatgttttcactcggtactatcccattcccgtacacatgacccacctcatccaccatgctctatcctccstcttcctggagtgctcccagaatcctcctcaggcaacaacttccttttgaactccccaactcctttgctcaaatactgctttttaggtggctctatcctttggctcatcatttctggtgatgaacaacctttatctttccaccccagtgttagataaaagttattatcttatacttgtgccaagatgcagaatttgggacgttctgacctatgattatacttgtgtatttgtcaacctgctaatatgttaatacatacgtgtatttatatatacatatctggagagatttttcagtcattgttttacaaaaatggaatattactcattcttttatctttcaataattctttgaggaaatcccttcaaggctactgtataaatctaattcattatgtccagtggcggtaacataattttaaaacattttctgctggtgggatccagcctttgtgtggttttgttttgtcttatcactgtacaaaaagctcatataattttttttttttttttgaggcagggtctcattgtcacccaagctggagagcagtggcgcgatattggctcgctgtaacctctgcctcccaggctcaagctatcttcccacctcagcctcctgagtagctgasactactggtgcatgccaccatgcctggccagatttttttgttttttttggtagaaatggggtctcactaataacctacttttaatgggatagattgtcagccatgaaagtactagatttaagaaaatgtactttttaaatattgataggtattgttacattacatttcataaagccttaaaagtgatattttaatctaccatgtatcagaatatccatttatctaaatccagagcaggtatttccccttattttcatttgtattagtgcattaggtctaaatgacatctcattgttttctctaacattttctgacttctattaaatttgagcatcttttcatttttattggctttttatattgtcccaccttaaaaataccttttcaggctgggaagggtggctcacccctgtaatcccagcactttgggaggccgaggcaggaagattgcttgagcccgggagttcaagaccagtccgggcaacatggtgaaactccatctctactaaaaaaacaaaacaaaaaaaaaaaaaaccagaatattagctgggcatggtgatgcgtgcttgtaatcccagctactcagaaggctgaggtgggaggatcrcttgagcccagggggtggaggctgaggtgagctgagatcatgctactgtactccagcctgggtgacagactgagaccttgtctcaaataaaataataaaataaataaaatacctctccatatatttgcccattttttaatttctcattttcacgggtacatagtaggtrtatatattaatggagtacatgagctattttgatacaggcatgcaatgagtaataatcccaccaatgtaaatgcagtatccatctccctaagcatttttcctttgtgttagaagcaatccaattatactcttttattttaaaatgtacaattmaattatttastrtaatcaccttgttgtgctatcaaacactagctcttattcttcattctttctrttttttatactcactaactattcacccccctccccatgacccttcccagcctctgttaaccatccttctactctgtcttcacaagttcaattgttctgatttttagctcccactaataagtgagaacatgcgaagtttgtcttcctgttcctgtctttgcccccatttttttcttttagtttttctttgtccccttcttgtctatttgtgaaattgtgttgccttttgtggatattaactatcrtctctcttgcatttttttctaaatcaaatattttaagaatgatttgctgttcataccagtgtgtacatatatgtttttgtgttcttaaagatcagttccaatgggctgacataggttgaccaggtaatagttattatatagttgcacagagcagtgcatctggagacacagacacatcactaaaatcttttttgtcaaaactatgaattgcaaaaaggagctttcagtgataaaaactcttggtgtgacctaggggaaaagggtcatctcaggtcctctaaatatttttgaaagagacagtccttatttcctgggaatgaatactggtgacttacatgcctttgttgagggatatttattatcatacaaatattttttgaaggagaggtgttcactgatgatgaaccgtgtcattacactattcctgaacttttacaattactttttaaatcttgcttttgaaggtataggtttcttaattatttggtggttgtcatttttttttaactttgtgttttgaaataattcaacattcacaggagttgcaaaaatgcaaagactcacacacacttcatgcaaactctctatagttagcatcttgcttaactgtagtaactatagtctcatgtaagaactagaaaattaacattggtacaatccacagagtttagtcagattttaccaattttacagacacgtgtgtgtgtatgtctatgtacttctattggggttttttttttaactgtaatgtgtcaaacaaattaytctgtcactgaaatcctaagctccacactcataaataaaagtagataaarctgaggtcatagacaaagtagggcatgggagtagctttctgactgatgctrtggagtgccattctgcctataaccttgaaaaaatatctacaaatgtgcctcaggttgtcatggctccacttagacctgcacgaagacagagcrtacataaaacccccttttgatcttacaaagttgatgattcttggccttatgatgggaaacagagctcagtacttttaggctggctggtagggaccttctcttacttaaggataaataaataatgagtrtttgtgaagatatgttctcctgactacagtgacacctgctgagaytgtttggattgtaactttatagcatccttttccagaattagttacacatccacaatcaggcaaccataactactctaccaataatgtctcatgtacaactgtgaacaagtaaattaatgccaactagtgcctgaccacacaccgtgacaaaggatgtgtgcttgggcagcagtaccccctttctctttatgaattgtcttaggagctctctaggagaacttgaaaggagtcaggaaaatgtggaggaagcattgctttgcccctgcaggaaatgcagcttcaaaatacttccatgttaatagcatccattgacttcagactgagaatcagaaacgagtgctactaggtcattggtccaacttcctcatttttcttgtaagtaaatgtggtccagaaaagtgaagtgatatgctttaaaggcacaatgataattagtgacgaagtcttgactaaaattccagctatcttcctctgaaaagatgctctttccactgtaacattatagcactttgttcmtttttatggattgaatgaatgggttaaaaagtcaaaacagtctacagaatttccaagattatttttctcctctttgttcctggagtatcctaagaagacatatgtgggcaatcctgggacaggcagccatctcttgctatggagaacttactggtaagagtggttttggtggctgtaatgcttatgctgagctaatgtaacaaaattcartcaagaatttctaaascattctattttttttttttctccctgagactccaaaagaagtttaactggggtctagttaggatgtttgaggaaaatttgggtagtcttagatccaatatattttagatgaactcagctatttattagtattgactgtttaaaaaaagttatgagataggttaaatatacacagaagtggactaatcagtataataaatcccatgtaggccatgaacttcagtactgcaataggtggttaattattggttttaaaataaatatgtatgaatgattctgtttctttctagatggcccttccattttgcagagagaaagggttttttggggggtagggtggttgttaaatgattcttttcttctgattatctacccagtgtagcatctstcttcctctgaatggccctggactttaagatattctacttgggaggctgaagtgggaggatcacttgagcctaggagttcaaggccagcctgggcagtatagtgagaycccatctcttaaaaaatagatagtattgtggtttgtattggcactcagaaatacaaacccacaatgtagaatttagaatgatgattgaaatctaccatagacgatcatttggtatataagataccattgggagccacgtttcccaccgtgagactggcctctgttggtaaaatcagcagtggaacatacgtgttgttatacatagtggtggttaaatggctaaaccaaacataaaacccaggctagagggagcagtaaagaccaaaacttagatattatggtctctttaaattggactgagtactttccacccacgttgttctattttaagttgggtaagtggttgtcttcccagctgaactttagtaagttmtgttggagacagggaccattttatttttgttgcttgtctgtccttaatgcctggcaataaatgttgaygtttgttgaatggatgaatggacagaaggatgggtggttgaacaaaggagtaaagaaagacatcttgggaaataaaactgaatcagtagcctcaacattgtagatgccagtgtgtggtgtcagggtgtttcaaaggctggcccatttttaaccgaatatcatcaagagcagtgtagcattaaaataaatcattctattattgcctcaggtcacatttttggaacctaattaaaagttcaatgacagcctttttttttttttcccccaaaagcaacaaagggattctgattccagaagaaagacactggtgcttcagtttaatgctgtccctagagttcaaagcatggatgccctgtagaggaaagaccttgttagaagaggatccttttcatattttaatgatttaattaatttttcccattttatacaaaattacattctctaaaagtaattttggtcatgtataggaaaatgccagggatatgtcctagagaagggggaggtcaaaagtagattgtgacccactagaaattgtagtggtctgctgagtattatccacaagagcaaatccaacatggtagagcagaattcgtagaattcatttagctcattagatggctgtcaaacatcaggccstaaaatgtggaaaggggatgcagagaagggaaattgattatcccagtcctgttggtaacagaactctcattagcacgtcagggagcacccacaatccagtgtctctgcctttatagcctggacccagtactgtcctctggatggagacaccctgttcctaatcccatccctagtgtccaagtcttaccttgtctatgttgattggttatcccgtggtgtgttctctaggtcactcactttcttgatcaccctcttctgaatcacacagtgggttagtaaaggccttaaaaatgttataaggtacaacaaatgcagaataaaaaccctagtacaacaaaagaatattagtgtctgtcatctcagttaaggcaatggagttatattgtatactggtatatttcacatttttagtcccctatgtttgacacccccagtttgaaacacaagagtaattctctctactctctccttaacacagaagaattgtaggttacctactcagagttctcataggtttcttctttatccttgagtgcttttgagtttatgtttaaataaaaatctttctaatagtcttatcattgaccttgaatgttctggaaatttaaatatctcaggataaaaacataacagaaatattaaactcaaaggaatcctgaagccagtcttaggagaaactacagaattgtaggccttttctgtcttattctcctgacattaattctctcsctattacccctcttcattttcccaccacccacacaaagctgggaagacatgacatttggaacattcccctttgaggacccacarttaaatgacaatgaagtgagctggcagtctctcaactcctgtgattccaaaggctcccaatccagaatgtttctaactgatggtcatgagtcactgatggattttgaattcaatttagcctgtctcaccaaacttaaaaaagaaaaacaaaattttatataatagatgatgtcagagagcatcacatatagtatgacagtttcatgacatcagctgtctatatgttctagattatgatgtaacatgttstcaggctgctctactagttcattgttcctcccagtggaatggggaatcacaggaataaaagaccaacttttgtcccaaggtaatttttagtacctggctttccttggctggctactaaatccactgtatttgctcttcttttgcacagaaataatgaagcaccaagccttttccacttctaacaatagcgtgattcctctgacaactcctttagaaaacaatgccttaacctgactacagaaaggagtaaatattttagactgctacattccccattacctgagaggaaatatgttaatgatcctgtgctccacttagtttaaattttgttctctgcagtaatactgttgtagattattaataagccttcattccttgtgagacaattcgttacctttacactggtgcaaatgcatttttcagtgattctctggaattattccattcaaatatgaagaatttgccaaaaagatagaaagagagattgagaaattgaaacttggctaggtagaaaatggtaccagagctgcacygcctcccttgggcttttctcataaccataagttgacggtgatggtattttgcacgtgggacttgagcataccaaagggaagaacatcctcagtcctaatgaatgtgctgagcctattatgtgttcaggcagtctccctggaataccagtaaaagaaaattaaacaactcacgacagctatcttgcatatctcacctgggaaggtatgcatgcagtaggacagrcactgcttaacattaatcagcctcctgaagtcattacattcatgaggaaatgtaattcacatgtgattactttttaatttactctgtaatcacattccaagtgaacgggccaagcttaaaatgaaatttaaaagtcaaatactgctttgtattaggaattcacaatttttatatgcacttaggttagtaaagattttacaataaccatttgtgactgagcatatgataattttttgatgaaagttagtgccatacctaagataagatgtatttgatttctctccaagtgctgaactggacctggagagtctcagaactctactctgtagtgaattcctgcctcatctaaactttatttgaaaagaaaaaaaagtcatccaaacgttcctcaatcccagatctgaagttgcgatgaactaatgtatttttaattcctgctgtgcctgtgaggcatatgcatttgttttatccatcatcagaaggtgtatacagaacctcataataactgatttcagctcatcaatggggaatgccagggcctgcagtaagaatcttcctccaacaatgtggtctttcaagtttgtgaagttacaaagctgctgtgttggtttcatgggagccttgaaactaaaggttcaaaaggccagaaccagctagttatggatagtagtgggtaggtttgtgctgtgctttataagccagaactaagggcattggagagaaatgtacaaaggtttttcagatttccagtcaatacaaagaagaaatgtttttcatttgaccccctctaccactacattgaacaacctcggaagtactaagataccctttccagaaaatattcaaaagctggattccattttccagggatgttgtatagtgttaccaaacataggttattagctttgaaatttcaagatatttgtaatacctttatgctaactttactaatatttactttagctcaactcattttgttttcacttcacaactgctttggcattgttttaatccagtactgttaaaataaatataatgcaaggcacatgagatttttgagttgccatattacagaagcaggagaaattaattttacattttatttaacccactgtatcctattatttcaacatgcaaatcaataagaaattttaaatgagatttctttttttttaatgctatgaaatcttgtgtgtattttacacttatagcacatctcagtttggactagtcacagtttacattgacaagagccacatgtggctagggactactatgggcagaatagttccaagctgtggcatttatgaaatcatgactgacatgatggttatatatttttaaatgcatgttaagtatgctgcttttcgaattttaaagtttgaattagtaaatggaatatgtaccacactatggggaacaccgacttgaaaagcagttcttttatctgtctacgtatatatgtatctatctatttggggtgcagtaatctacatgttggatggagtttatatgcatggggtgtctgcatggctgtatgtacttacctgtggtccccagtacatgatccatacggctttttgcccacacaaaagcatagcaaagtataagaaatgagactaatataatcctgcttgatttttttttttacaaataaaacatttactatcatagtatgtatatattgtatatatgtatgatatcatctatgtaatggatatgtgtgtgcatgtatatatgtgtaatatatgttatatatgtatgtctgtatatatgtttatatgtatgtatgtatgttacacatcctaggccattgctgcttccgtctgcacttagggcgggtgtgtggtccctaacccactttggtaggtggaataatgatcccccaaagaggtattaattctaatccccaacacctgtgaatgttaccttacatgaccaaatggrctttgcagatgtgattaggttaaaaattttgggatagggggattatctggtattattcaggtaggtccaatgtattcacaagggtccttataaatgaaagagggaggcaagcgartcagagtgagagaaggtgtgatgagggatgcagaggtctgagtgttgtggtgtgagcaggacttgacctgatgttgctggctttgaagatgtgggaaggcaccatgaggtgaggaatgtgggcttcctctagaagctggacaaagtaagggaatggattctgaactagagcccccagaaggaacacagccctgcttactttttggttttaccccagtgacagccatttcagacttctgacttccaaaacgataggataaatatgtgttgtttcaagccctaagtrtgtggtaatttgtgacagcggcaataataaactaatatgtccatcctcagtaactggttgattaaaactgtatcactttcaagtttttttcgtttaaacaaatttcaatagctttaggggtacaagtaggttttggttatgtgatgaattgtatagcagtcaagcctgaaattttagggcatgcatcacctgagttgtgcacatggtacccaatatgtagttttttaaaatcccccacgcccctcccaccctcccttctgagtctccagtgtccattataacattctgtatgcctttgcatatccatagcttagctcctctgtgtatgtgagaacacgtggtatttggtttttctttcctgagttacrtcacttagaataatggcctccagttccatgaaagttgctgcaaaagacattatttttttcttgtttatggttgagtagtattccatggtatacatatatatatgtgtgtatatatatcatgtttatatgtatattaatatatataattatatatacatatatataattatatataaatataaatataattatataaatataaatatataaatatatatatatatatatcacattttccttatccgcttattggtttatggtcacttaggttggttccacgtcttttcaattgtgaactgtgttgcaataaatataygtgtgcaggtgtcttttttgatctcatgacttactttcctttcggtagaaacccagtattgggatcgcaagatagaatggtaggtcaacttttagatctttgagaaatcacgatattattttccataaaggttgtactaatttcatttccaccagaagtgtataaatgttcccttttttaccacatccatgtcaacatctattgtttctggactttttaataatgaccattctggagggggtaaaatggtgtcttactgtggttttttttggttgtttgtttttgtttttttgagacaaagtctcattcttgtcccccaggctggagtggaatggcgcgatcttggctaactgcaacgtccgccttctgggttcaagtgattctcctgcctcagccycctgagtagctgggattacagctccctgccgctatgcctggctaatgtttgtatttttagttgttacagcgtttctccatgttggccaggctggtctagaactcctgacttcaggtgatccaccctcctcggcctcctaaggtgctgggattacaggtgtgagccacygcacccagscctcactgtggttttaatttgcatttccctgatgatgagtgatgttgagcatttttttcatgtttggtggccacttgtatatcttcttttgagaaatgtctgttcatgtcctttgcccattttttaatgggattatttgttttttatccttgctgatttgtttgagttcctagcagattctggatattagtcctttgtcagatgcatagtttgcaaatattttcacccattctgtgggctttttactgtgatgattgtttcttttgctgtgcagaagctttttagtttaattaggtatcatttattcatttttgtttttgtttcatttgctttggagtcttagtcatagattgtttgcctaggccaatatccagaagagtttttcctaggttttcttctaagatttttatggtttcatgtcttagatttaggtctttaatccctcttgagttgatttttgtatatgatgagagataaggatcccgtttaattcttctacatggggctatccaggtttcccagtaccatttattaaatagagtgtcctttccccagtttatgttttttaatgctttgtttcagatcacttggtcctaagtatttagctttatttctaggttccctattctgttccattggcctataaatctacttttatactagtaccatgctgtcttggttactattgctttgtagtataatttgaagtcaggcaatgtgttgcctctagatttgttccgtttaggatttctttggctatttgggctctttttggttccatatgcgaactttaggattgagttttctatttctgtgaaaaaaatggttttttgataggaattgcattgactctgtagattgctttggataatcagattatgatcattttcatgatattcttccaatccatgatcattggatgtcttcacatttgtgtcgtctatgatactttcaagttctttagattggaaagcgagcccattttttaacacccatatcaaacacctcttttcctgggatgttttcctgaaccactttggctgaggtgtgaggactctctccttcctttcctgcccccatgttctcattactggcccctgacattggacatatcacactgtgctacagtcatatatgtgaaagcctgtgtcccycactaaactgtttgcagggtcaggatgtggcatctccacagccagcacttgattggccccagaaatatttgaatgcttgagcaagtgcctcaagacttggatcttacctttctataaaatgacttgtcaaggccatggttataggtatgcatatttcttcttttctgcctcatctatgtccctgtgtttgagagttgtccattttctttttgaaatggtctgaggcctttcttctggaagctctttagccaactaaatgatatttttatttagttttcttttagaaattcattatcactttgcagaatatactgggaaattgatgtagagtctcattgtctcctcctctgttagcctggaaagacaaatgcccagacctttgcagcctgaacactggctcttacatgcattgaaacctaagggtgctgagaccagctctgtccctcggcatgtcttctgatgcaggtccattctcagcagcagtgttgctgcaactggtcagtgattatactcacatccgcatttaggcttgggcacgattacagtagttctcgtaaagtgactaagtgcattctaagtgttcatatttctgaagtgtattttgttaattatccttctcatggttraggattttaaattttgagaaatctccatttttctgagtgcagtctggtgtttacaattctaccttttaagcaaaatgtcatccctttagttttcggtcatcttaccccagtgtcatttagaatgaatgattttaagaacacagagagaatattctttcactggcagtggaagtggcagaccaatcacttcagtagaaacttgtgtcattcaaaattatgaagttcatataacctataaacaattatttgaaaaagctcttaatgtggatcgtggttacgaaaagtcaaaaccaaacatgagtcacgcagcctgtagttatcagttctgctttcacggatggtggtggaatcattttagagggtagaaagttaggactcagagtgtggggtgaaataaagatacatatccagaagttcagatcctgggcaggtaagcagcatgtagggtaaaggtgtcaaatatgagatgcaggcaactctgctaattgaacttggaaatcccatttacttctgaatgccctgtagagagcatggctcaactcaatctctgtgttgattgttcatagatcagatgcttacctctggttacgtgtccacccatacaggagaggtagagtcacagaacggaaactcctccacagccatttgggaggtagggagatgagtctctgttggctttcatgaaaggcatctgccataccccatgtctccagccacagcattcatgctgagtcctaaacctacatctgcatttgtctccttgctttagggctttcagcagccctcagtttacctttttcaaaggccattgaacttttgcctgtctatcctttaactttttttttttttttttttgagacatagtgttgctctgttgcccaggctggagtgcagtgacgtgaactcagctcactgcaacctccgcctcccgggctcgagcgattctcttgcctccgcctcctgagtagctgggattacaggcacccaccaccatgctttggtaatttttatatttttggtagagacagggtttcgccatgtttgctaggctggtctcgaactcctggtctcaagtaatccacccgcctcagtctccaatcctcagtgctgggattacaggtgtgagccaccacacccagccttttacctttatttttttgattgtaggtgttttggtttgttttctgtttggtttgtattatctgaacttttcattttctgtaattggctttgttagtcttttcttttgggtttctcccactgtaaaaatgtttaaaaatgactttttaaaagtattttaaatcattttgctgttttcaatgctttatgttttaaatgaaacatttttatttttaaaatttttaatctttaatctgtctccaatttatttgggataaggtgtgaggtagggttcacattcttttcaatgtcctcactttcccaaaataacatttgttgattaattcatctggcctcatgaatttgcaatgtcatataaaaaaatactacttttctgtgtgtttgagtctgtttctggaggagaggatcatgctttggtcactatgcccttctaatcactacggctttatgatgtggttttgtatgtgagcaatgtacactgccattatgttcgtatggtatgttcatttcagttcagtggacttgaaatactgctttttatcttgctagttagagagatttttgagtagttcactaggtgacaacctgccgttttctaagtacgagactagtcaacagttggttattaaagcagaaaatactgctatttttatttcaaatgtatccctttttctatagcttttaataaaacatgtgtttaagcattatttttgtataaattctgttcttaattttttatcactttgggttgttggcattggtaccaaagctgtatagtatacaccactgtgctgttttcttgatcattgctggctgactctttggagaaaggaaccattgtttttttattttattttatttttttaattgtgggatactgcctcacttaaattagaaggaagtatcaggaagactttatctcctggaagcaaagcagatgttcaataaaattttcttagcttcccagggcctcccagtcacaggaaaaagacacaacttcaaaatctcccttagtttttttttgagatggagtctcactctgttgctcaggctggagtgcaagggtgcaatctcggctcactgcaacctccacctcccggattcaagggattctcatgcctcagttccccaagtagctgggactacacgtgtgcactaccatgcccagctaatttttgtattttttttaaattttattattattatactttaagttttagggtacatgtgcacaatgtgcaggttagttacatatgtatacatgtgccatgctggtgtgctgcacccattaactcgtcatttagcattaggtatatctcctaatgctatccctcccygctcccccaccccacaacagtccccagtgatgttgtatttttagtagagacacggtttcaccatgttggccaggctggtctcaaactcctgacctcaggtgatctgcctgctttggactcctaaagtgctgggattacaggtgtgagccaccgtgcccagccctcccttagaatttttactataactatcttttggccagcttttrggggtatgtgtacatcacctttgtycttttccaccttttttcttttagtttttcttttttttttttctggtctcatctcactcccactctctggccattagccatttcactgcgtcatttctgagaaaactgtctcagccatctcagaaaagcagttctgactgttatgaagcaaacaaaaataacagagcaagaagtgaatgtgggacgttattttggttctgtgatgtcatcagtcaatcacaattcaactttccaaatgttgtttgcaggtctgtttaagattgtggtattttaactggttggcttctgtatgatgtttgagaatgattaattctcaaaatagtttttccctactgaaaagtagctgacttaaaagaaacatgtttcaaagctgaatggaagtcatcattaactggcctaaatgcaggtcagatgggttcctaagggaaagagcatcctttggtccttcttctctctttgaaacttgaagaggtaactgttcaatgcatacatggcttccacctctaattagtagttttgctgaacaagtgctggattatcaagaacctaaccaaccaactccgaagaatacagaatgttttagaatttaactttcatcagaacaactttttcagtccttagcaaagtagttaactcttttgaaatgaaaaaacgtgggtaaatgtcagagagctgaaaaacgattcatgtcattactaaaacattcacattcaaataataccaatgccgaccaaattctagtgaattctgtaatgatcgcattatcaggtaaaatgtggaggctggtgtttacaagccatgtcttgcaataaatatagcaaatgcagggaaccagaaaagtcattcttctgtggtcatttgtaatctacttataagaaggaaggaagaatgggkgtagggcggagttgtagcattcagcagaattgccctaaagtatctaaagtatgaaactaaaagcctgaatgattgattgtgggaagatttcagtaaatgatactcaaattaaaacattaggtgagtgactttaagaaaattacattgccacatgcaatttattcactgaaaaggaacttttaaaatargatgaataatacaaaaaaatccggagatctagttagagaatacaagcttttcttttctttctcctctttcccccccacccccagcttctaaattgaacacctgtcagatttttttttccctttcatttatttgacttgtcagagaaaaaaggtcagactgatcaccagctctactttttaacagacagaagcctgtaattgagagtaattcctctgcaattttgtaggcaggggctgtctcatgcttgctttcaaaagctaggtgaggagagaaatgctggtgttctctaagtgaatcaactttattcaccgggctgcagatcatttctgatttttactgaagtgcagaaagctacagtgctcatattagtgtccttcttttagatgaatagaagtgtaatctatttttaacttctactggggtgccctgcggctaaaaaaaaaattgctttgtgagaggcagctcagaaatgtctcattttgaaattctgcattcttaagaatacaaggtggcttactattttttctttctttgagaagtttccatccttgctcaagatttcacttgagatggaaattgtgcatgtttgtctttaatagaaatagattcaatgtttgtcatcatggtgtgatatatattatgatgcaatgtaaagaagtttggaaaagctgaattaatttctttataaaaatagttactgtcaaaatttgaaggatgaaatgaaggcactccttaactcatatgaaacttcacaaaatctgtgtccaaagctttcactactcattaatggtttcttgtttgaggcaagacccagagaaaaaggaatcattcagcggaaagcatacacacattgaatccaatttaaactcttggttgtgtataattttacaaaatacagtcactttttcaactaaaaaataaagccaaaatatcataatatgtgatagaagcatgtcagcatctacggtgtgatctatttattttaccaagtacaaaagtgaggtggaataacagaaagctgggacataagttgaaaatgtctaattttgaaggaactgaattctgtttgcctttaatgtaataatggtaaaaaaaaaaaaaaaaaaaaaagaaagaaactgtcaagatccctgagttcatagacacctgttagagtctgacattcaatggattgtactatgttgaaatcagaaaacagtgctgacaaaaggtgtagatggtccaagtcatatcattagttatggaaaatgtgcttggaatctatgatgctctgtgtaatacaggtgcatcattttgaaaatgtatggggtaatttcagaggtcactttgataaaccttgcctttttcattattgtcatctaataaccattcatcctagaaccataatatataaaaatccccacataaataggtagaattgtaattttttaaaagcacaattttaaccataaaacagaggagtgattaccagctatgatcagtaaggctgaattatatcatacttagaagagagagatgcaaatgaatgaattaaattaggagcacaattctcttcttaaatcagcatctttgactgtcagaacctggactagagtgcattattcttaatagactgtgatttgtattgaaataggacaataaatctgtttattgaaatttatttgctgcttgttgttcagtttttctggctttgtgcaggagcagggtgaatgtaataggcagggctggtgaktcagcagaakgccatttttgtaagtgatcacccactctctagattgaagactcattaacacaaagataggatcaaatattctgcattcactgctttacattgcgtgtttcacaggaaacccgtgaaggcttccgagggcaccagcaatggaacaatccaagagtttccctccatggcctaatttaaaaactgcatttatacttcggtcctcagaggacaacttctcttctaaacttcagcctcatccacttcaattctgtattacgtgtggtaacttcatttgtcttttttctcactyttattttgtgaagccaatttaatgacaggcttgtgatgtgttgattgcartttgacattagggggtttcacattttgcacgctgactccagtgagaggcttgtattttgtgttccctggccatcatgggtaaacacacagaagaagaatgaaaatgaatcacaatgtataccatttgatcccccacaggaccctctgaaagaaaggttgctttgaccttgtcttggtttgcatattttaagtaagctctaatcacgagctatttcagttttgataaaataggcctcaacactctacgggcatgaactggtaaaatacaaaataatcacaaagctttaataagaaatacacatcagtgggagctagagtagaaagctcccatttgaatttaaatatcttatgcctcctaatttgagggagtgtagaacataggaagaaaatgaaaagatggtggtatttgttaaaaaaaaaaaacaaatacaataaaaacatccatctacaaagtttkcgggcatggcactttccatcctttttacagctcttctgctctaatttctctttcccaaccttagctttatcaatctaacactgtctttccttgttactagagctaatgaggcccgtctatactcacagaggattaatcagtgattataaaccatttaggagatgcagggtgttctgtacgcagcccacctccgttatgactgtgtaacattcttggtttgacctacatacacagtagtgatgacattgccctgccactgtcaagttgctcttggcttcaagttaaaccttcctgttttcttggattttcgaaaatgctgagcctttttgaaaaacagttgactaactcacacaaattcagtcaacctttgacaagggcacaaaagtgactacatggagaaaggataacttttcaacaaatggtggtagaacagttgaacatccactgtaaaaatatgaacttaagcaaagaccttgcatatgtcacaaaaaaactcaaatgaataatagacctaaatgtgaaatgcaaaagtataaaatctagaaaaaaatctgggatcttgtatttggtaatgtgttagtaggtatatacaccaccaaaaacataatgcatgaaaaaaatcgtaagttacacttaattaaaatgaaaacttaagctatgcaaaagacactatgaagaaaaaagccaagccagagtctgggagaacacaaaatacaaatctgataaaggacttgtatccataatatagaaagaacccttacaactcaacagtaagaaaacaaaacaagctaattttaaaaatgatcaaaagatctgaatacatagctcactaaagatgtgcagatggaaaacgtacatatgaaaagatgttcaacgtcacatgttggtagagagttgcaaattagtacaagatgatactatcacacagccactggtgtgtgacaataccattaatagggaggatgtagagcaaataccaaataccaaaaactgacaataccattaatagggaggatgtagagcaacaaggactctcatacattgcttatgagaatgtaaaatagcacaggcgctttgaaagacagttttgcagtttcctacaaagttaaacatagttttaccatacaatccagcagtcatatacctaggtatttacccaactgatatgaaaasttatgaaattagaaaaccctgcactggaatgtttgtctcagctttattcataattccccaaactggaaacaaccaaaatgtccttcaataagtgaatgaataaacaagctctgttacatctgtagaatggaacattactcagcaataraaaggaatgaactatacatagaaacatggatgaatagtaaatgtatattgctaaggaaagaagctagtctgaaaaggctatctactgcatgatgcaactttattaactttctggtaaagacaaaaccatggagatggtaaacaaatcattgttactgaaggttctggggtgaggtttaataggtgaaacatgcgatttttttttttccccacaccatgaaactattcaattygacgctgtaaatggtggatacctgacattctgcatttactaaaaccagggtacatttctgcttcacgaataaaccgtgggagcaacaaatacacctaacacccagatctttgtttctaattccatttcccaataaaagaaaccaaggttctttggagaaatggcaaattctgggacttcagcaagaaatatacatgatgagcctggagcacgttatagtgccaagaagtaagacagtgctcagaaaacacaacaaaataaatcacaataatgggagtgtgttaaagggacataggagccaactcaaggagttcccaagcgccaaagatgggtcgcttcgaacagcagaataaacactattgaattataacccaaaatataaaaaaagatttgaataaatagggatggaaataaatgattgaataaacaaataaatgaggtagaattgaaaaatctgtttagcagaattccggatagttctcataaatactgcaaggagctggagcctagctctcacatcttaaatgtcggccacacgtggtttcttgtccaaagtgtacagcttaaaaaggaggaaaaaagagtaacttcagaatgcaaaaattgaataaacaatacttcaaccagtgatcaaggttaacatcatcggtgataagtcatgttgataatatggacgttgctatgatgtgatgagtatggcactttatctttgtggtgttcctcccaaaaaaccatagacatagtgcaatcatgagaaagacatcagacaaaccttaactgagggacttcagcaacatacttgcctcagtactattaaggtcataagaaacagtaaaggtctcataaactgtcacaactaagaaaagtcttaagcaacataagttatgttaatatggtatcttggatggggtcctggagtagaaaaagcatattagattgaaaactaaggaaatcccaataaaatagaggcttttgttaatagtaatgtctcagaggccaggcatggtagctcacaccaagagtctgagaccagtctgggaagcatagtaagagttggtctctaccaaaaaataaaaaacaaattaggtgtgataatgcccggtaatccgagttactcaggaggctgaggcaggagaatcacttgagcccaggagtttgaggctgcagtgagctctgatcacgtcactgtactccagcttgagtggcaaagaccctgactcaaaaaaaaaaaacgaaaaataaattaatataaataataatttatgaatgctagttcartgattgtaacaactctatcatatatggaagttgctaataatagtggaaactaggtgtggcatatatgggaactctgaactctttataatttttctgtagatttaaaactagtctaaaattaaaawgtaaaaacgttaacgctgttgactgtcatcaggatctgggccacagtaggaaatattttttcttagtaaaagttactggccctaatagagattggacacagttggtcttggttttaaagggattctggggaggcaagagggtgtcggcatcacttaatcagtttccttgattgacttggcattgtcaagttttgaaaagagtgtgacatggcacacttgagcctgtggtgtgattttttgaagtacccagaatgtctgtggaacctctggtcaagtctgtggagcttctaagtgtgtctgattgagggacactgtcagtcaaacttgttagtcacggtgttgacttcaaattgaacaaaacactttcaaaacaatcctccatcataccacttttatttttttgtttgtttgtttatttgtttctttgtttgagacagagtctcactctgttgcccagatttgagtgcactggtgtgatttcagctcactgcaacctctgcctcctgggttcaagtgattctcctgcctaagcctcccragtagctgggattacaggcatgcaccaccacacctagctaatttttgtatttttagtagagatggattttcaccatgtcggctaggatgttctcaaactcctgacctcaagtgatstgcacgcctcggcctcccaaagtgctgggattgcaggtgtgagccaccgtgcctggccagctcctctgaccactttttcaagatattttacctgtttgaattgaaggtgatactttattcagaagatgtcagagagaaagaactacatatcctttttattctttcaggaaatgggcagagggggagttgtcatggacagaatatcttttaaaggagtggaaccctccattgttttttcttttttttctttttttttttttaaccctccattattttttgactttgtttttctgctttttacacactgcccccgactggcagcatttatagagaataaaaggaggaactaacaactcatttggacaagtattkattgattgattgattgatcaagacagggtctcactctgtcacccaggctgcagtgcagtggtgccatcatagctcactgcagtgtcaagctcccaggctcaagtgatcctcctacctcagcctcccaagtagctgggactacaggtttgtgctgctgtgcctgacttttttgttgttatatttttttgtagagacaggaacttgccatgttgcccaggctggtctcaaaactctggggctcaagctgtctgcctgcctcagcctcccaaagtgctaggattacaggtgtcagccactgtgcccactgggcctctgagcaaaatttaaaatgaaaggaaactaaccaagattttgcctagtgactagatgcaacctaatatgaaggagagcgtctgctgccatgttttgtgctacttaaagatgctaataggcagtgctctcaccaaatcatggaatcattgatatttggtttattgtgagaacagttgatgctgccttgttgaggtaggaggcctgtaggatttgttttcaggtcatggtcccactaatagaagcaggatttagtcaatcccgttttcagatgcagtgaagaagccagccaaaactaccaggtggggaggaaagcaacctctagttgccttcattgctcattagcataaagacactcccattggcgccaggacagtttacaagtgccatggcaacagcctagaagttatctcatatcgttctgaaaaccctctgcccctttttcagaaagttctgcataacctgcctcttacttagcatataattaaaagtccccaccagggattttgtgatcccatttatctaggctgttgcatatttcggatttgtttttcagagcatcatgcataaggtgattgctatgatgtatcacaggtagagatatatataggagggtgtacctccatttcttttggagtcagacatgtaacaacttaataaatgctaaaatatgaaggatataactgtcagaatgagataatgtgacaatatcttgaaggctataaagagctatggaaatgaaaattaaagtcaataaatgcaaaagaaatgcattgagcttttcactttgtgagaccagatcacaaatctgtatgaagattttcaattttaattattaccaagaggctttgtgcttattaaacatgtctttactaacaacctaaactctactctggtcttctgttgatgccagtggtaatagggggtgcttctgacattagaccaggccatgaatcctagcctatagctatatatccttgggaaattcctttacctttttgmacctagatgttcccatctgtaaaatgaggataatctgtaatctggggtcaggcactgtggctcacacctgtaatcccagcactttgggaggccgaggtgggcagatcacttgaggtcaggagttcgagaccagcctggccaacatggtggaacaccgtatctactaaaaacataaaaactagccagatgtggtggtgggcacctgtaatcccagctacttgggaggctgaggtgggagaatcgcttgaacccaggaggcagaggttgtagtgagccaagattgtaccactgcactccagcctggtgacagagtgagactcagtctcaaaaaaaaaaaaaaaaaaattaaaaaaatttgtaatctgtgtaatgattgtagagagtaatagtaatattcctggtgcaactttattttgttacttctcatagctggttggtaaatggtaccatcaatgtggcagtttaactcatggtactttaaagagactgtaatttttcctactcaccttcattttaaaatagaaaatttaaaaatatccagattatcaaatataagtaaatgcttacttagtttgtttaaaatatgtgcagtgttttaaattttgtgagtactgtacaagttaaataagatcaaagtacttgattctttaatcttgcaatccagtaatttagagatggtgaaaattctgtttggttcttccagatacagattaaaattccaaaatttaaatatggcattttatttagattctgaaagataaatgcttatctgtgaaaaagcatcaacgtcaaattataaaggaagacctccatacgtttttacaacatatgccctgtttttctaacagagaattaaaatataaaatgtacattttatattctgaatgcctaagacaaacaaagagctaaaatattttttaaaatgaagctgttagaaacagtacttcaggatatttcttgaagactagaaaaatagtctttggcagatccagtctctgctcgattttgtctccatgaaaattccttcagctttcttttcatttctttcagggactgggattgggatgagggtgaagtgtggaacagcaggtggcccttaattctgacaaacccaaaccatcctgttatgttttaatgatgctgttgcaggtgtgaagtttttctctttctcctttttataacttcagcataagcacaagttgggttatttttgttgcaacagcacggtatattttttctacttttcatttaaaacttgactcactttgctgcccgtgatcttcctakttaraaatcacttcagcattatctcataaattttccattgacgagcttgtgtgctttttgtcaagtctttgtataagctgttttggtggcctaaacaccactgctctccatgctctccagaggctgcttgtcccagtttgtgtggttacagctgtgtaatttccattggccatatttacattacataaatatattacatatagtccccgtggaggattgcctccaaggttgggctctaattcctcagagaatttagaattgtcattcagattccatcttgaatctatttgacctcacatatgaggagagagcaatactggggaattaatggtagctgtttcctttcatgtagcatgcagaacgaagagaacccgtttagagagaccaagatgtcaggaagaaatgaaagatggcctagcttttccttagtgttctagaccagggttctagctggggccagatgcctgttttcatgaccttggatttcttaaacctgaaggaacctatttttttttttacacacttacaacctacagaaacatgtattataacctaatatttgaggtcctgtagctaggtagttgaatttcttataagttttcctgtcttggcagaaagaccctgttcttaaaaaaaaatggcacatcctccaaaaatcccatgttgatttaatttggcatattctcacaaagggaaggtcacggaacaagttccatttccattttaatggtttaatttcattatactaagcagacaactggaaacagaaggaaaccattaacaatattgtgatgtcacacaggacagatatttcaaaatggttttgctttatagaagtatgcatagtgtgaaaagattacaccactgtgatataggggaaagggcacaggcctttcaaatccctgccctgccgtctcttaactctgggaccgtgagtgggctgtgtggcatctatgaactttggttttctcttctgcataaaagagaataatgatacctactagagaattgttgcggtgatttactgagactgaaatgcgcctaatggaatgcggccacgtggtaggtagcaataaataccattcttttctcacttcttttgytgcccatgaaaagctaattctgaggaatctttaatcctttttactatctttttacaaacctactgtatgttaagagtcttatagtgtaattaaggggcccctcagtatttcttgaagtatattttatagggctctgaatatgagatggtaatacgtattttatataaagaacaaagggaaaatcgtccccaagctaaaacgctttaggagaatacagagggcaatatcagatttctttactgcagaacttctcagggtctttaatatgctcataccatggtatatttctaggaatacagtttagttttcagaatttccctaccttatttgatctgtgaaagtctttcttcaatatatatcacatgggatcagattgctgaggaagagctaatggacgaaaaacaacgtagtttaaatagtgagtaaagtgttagtattatttaaatcttagagttgatgaagtgaatctgacttgacatatctgtgctttttctttctccctccccccaccgccaccaacagagtcttgctgtgtcgtccaggctggagtgcagtggtatgatcttggctcactgcaacctctgcctccagggttcaagtgattctgctgcctcagtctcctgagtagctgggactacaggtgtgcgccacaacacccaggtaatttttgtatttttattacagaaagggttcaccatgttggccaggctggtctcgaactcccgacctgaggtgatccgcccgcctcagcctcccaaagtgctgggattacaggtgtgagccattgtgtctgccttatctgcgcttctttataataatgatagttttcccttgctaacccatttgggaagttaacatttgtgaaataaaaagatggggcttggccataggtcatgtgcactgaagaagcccatggggattggaagttgacttggctctctggcactaaatagccagctatcctcctcagttcttctgaatacctcctgaacagaaatttcttctttcagtgttttatataatagctaatcaggacacttcatattaacgttaaattcyagtgctgccagstatgaaaccaatcttgtctcactttcccgtagctaggactctcagcattgagtcacactattaactttcttttgtgattgtaatcctatgtggcataccagcaactcaaaatactttgggacttgaagtacattatctcctctcagattcacagcactgacccagtccagcctataccaaaatgtgattgtgacaaagcaaaggaaatgacagtattttagtgggaatccttttcagagaaaaagaagtcttgatggagtgagaactctttagctgaacctgaaaggtagatgatcatatcactaggtttggcataattatatctcagctgacattgctaaatgcacagtaaaagtaataccataggaggtgattcaaaaatcactaatctcagagtgcaaaacaatggtgctaaagctgccactttcaataaacacctttctccatggtgtattacaaaatggaatttgtctgtttccccatcccagtaagcctcttctgttttgacctacttctatgcgaagggactatagttagaatcattccttttacctcacttgttttttatttttaattggaaactttagtgttagggagaaactgatcataagacgagttaccaatacctttgtgaatgcctttagtttttttcatagccagttgtgctagtacttttgcctggcagtttcattttttctggattaagtaactgactatcaaattctaggtcaagttcaacttcttctagcttttttttttttttaaccttggcttattgtattatttccctgaccctctctctccttcccctccttattatttattttaatggcaggtatttatttttatgggcagcatttgttgttcctgggaagcatgtgtgtaatttgtggttttgtacataaattcacaaaggtctttgctaactgcttgggcatgctctttcgcacagatttttcatcattttcaccctgggagcatccagtctccctrtgagcatttttttttctcccacaattttatgttgtattttttcttcctgtttctggtcttcctctttggatttctggcctttctccttgctttgccctccttggtttctttccatgatccttttccctgagttagaggaattggagaaaacattaagtagccaaaagggtttcatatttccaagcaacggattttatggctcgatagccaaaggctagagcaggacttccatcggctcatgattgacgcagctcttttcattaaaccagcttcctcctcgtgctaaatctctctggtaacatttgccartactcagctttgtaagatggaaagctcctaggaaggcctgactctccaagtctttgggacatttcagccctcgatgagcttttttacttacctgacttgtgtttttccactttgttccatctctaccccacctacctaggtgtttgtccgtttccatatggcagttgccaggtgtttgtttatatatcacacagccttaaagtttgagaagtatgcctgtactacwcatgcttaaagctattttgattgcccttatgaaatgcaggtaaactatgctagagagtatttctatattctttactaattaatatctgatagagttgctctaatatagtagctactagtatgtggcttttgttgttgttgttgttgttttgagatggagtctcactctgtcacccaggctggagtgcagtggtacgagctcagctctctgcaacctttgcctcctgggttcaagcaattctcctgcctcagcctcctgagtagctgggattacaggcacataccaacatgcccggctaatttttgtatttttagtagagacggggtttcgccatgttggccaggctggtctctaactcctgactcaggtgatccaccttccttggcctcccaaagtgctgacattacaggcgtgagccaccacacctggccacatgtggctatttaaatttaactttgagtttaattaactcaatgatatttaaaactcgtctttcagctacattagccccgtttcaaatgctcagtaaatatatgtggttagtggccaccatattggacagaacagatctggaacagttctrttatcacaggaagttctattagagtgtgctacttcagactgagtcatggtttctatgggttgtactagggtagttaacagtaatgaaacccactgtcttctgcttatatcaagtatgctgttaatagcattgagttttaaaatgcttcagcttctaacttggtgaacgatttgttggtgatatcctaatttttagaggaggtagaggtgttcttgttgcccttctgaaaaactgtgcatttctcattttattgtccattgtagaatatgtgtataaatgtgcacagcttttatcttctatcttacctctcctttctgaagtatgcattgtaactttgctcgtattgccatttagacttcccaaagagtcattatgttgagtaaaaataatttagtcttttctttttgtttggcttaacttttcttccctcctaccctatatcttttgtcttccaagatattataactaggaagagttagcatatataattatgctattatctcagaccctgagataccctgtaggacagattcacaacagagtcatcatttccaggctaatagcagggggttcaccctattcagcattccacattttcctctgtaggcactcacattagttttatattttaggtagcaatatgtgtagtttagctttgtgcaaacatattaggagtagacattcagtgtactgtgtcctggttatctagattctaaagcttcattttataaaaatccagctctgtggggaaagaggggtgttttattaacatgcggcattaacactgctgggctctgtggataggttgacatagtgtcatcgtcacagaagataaaattcgaaggagcatttgtggagagcatgcagtggatattagaacaatatctcaggattttatggtggtttaatcattatccacccctatcctttcgttcacacagtcaacctatattttttaaaattcactacgtgccaggcactgtgttaactgctgtagtgactcaaatgtatgattgcatttatatgagatatccagaataagtaaatccatagagacagaaagcacgttggtcatttctaggggctggggaaaaagaaaataagaaataactgctgagtgggcatggcgttttattttaggatgatgaaaatgctttggaactagatagacataattgtgcaatattatgaattgatattaataaatgccactgagtggtttattttaaatggttaattttatattatgtgaaatttatctgagcttgaaaaaaaaaagcatggaccttgaaagcaaatagatttataatcaggttccaacttgacttctcattagccatgtgattttggccaaattatattttctctctgaacttctgttttgtaacactagtataaaaataatagactttttttccagttagaaaggccaacagtgttaattagttttcagggaaatataagatgcatataaacataaacaaaatataaaacaaaacaatcaaaatcttacagtccaggagcatatcaagacagagcattttttgcagacacaagagtactatcaaagggaaaaatgatacctggaaagtaaaaggccaaggggcttgggtgggtcccttacccaaggacactgcatttttgtggtgtagccataagatttttttttctttttaaaaagcacttcagtcttaaaaatattagaaacaggccaggcacggtggctcacgcctgtaatcccagcacttcgggaggctgaggcgggcggatcaggaggtcaagagatggagaccatcctggccaacatggtgaaactgtctctactaaaaatacaaaaattagctgggcgtggtggcagatgcctgcaatcccagctactcgggaggctgaagcmggagaatcacttgaacccaggaggcggaggttgcagtgaaccaagatcgcgccactgcactccagcctagcgacagagtgagactcgatctcaaaaaaaaaaaaaacayatatatatatatatatatatatatatatatatattagaaacatggagatagtttagcaccaccattgatcctgaaaatattttagcacccacagtgactgcactgaatttaatgtccttttctcgattttctctgctgagggagaaagagggaaaacccagagaaagggctcctcctgaccccrcagagtccactgagaactgagaccagttgagcagacagcgtgaggaattctccaaaattctgcagccccggaaacatccaccatttcatgcttcgttgatctccactcctgcctaggcctcaccttcccacagacctctcaggacctggcagggaaacccatttgtcatcctgtgtcctggatttaaggacaagctgttgcagagaaaaggttgtacatttaaggatggtggctgttcatactttttttctctgaaataaactcctaagagcagtatgccttggttatragccactaaaaaatggaaagctgcatccatggatgaacattcactttacccagtctaattcataccagggtggctgactcagaaaactgcactaccacaagtatcattagagatacttgagattcactggtgaatagaaggccaagtgaggttgccttcttcccaggtgtgcctgatggatggaatctggaccctaagataccagtctgggaatggtgggtccctgctgcataatccatcatgatctttcaacctgagaggctagctttggatgggacagtctgtttaaggttgtagctgattttagtgtggaaatggacagaaagtagttggtccaatgccgtgctcatagtaagtcttcagcaaatttcagctgctgtaatcatgatttataattgcttttcagataccatgatgaaataaaataatggtatatacatacagaatggagatagggggaatgtgttttattcgttacccatatcatacagtaagatgtaggtgaagcaagcagaatatgtggtagcaatctttatatcacttctactgaaatgttagatacagagaaaatgtgttgaatatatccagttttgtttctttaatggagtaaattggatcatttctattactagtagacagaagacctctttcctgcaacagcctggacagtcctgcttggaggagcctctgcccatctcacaccaaccttgtctcagtatccagccaccctggctgccttttagttcctcacatatactaagttttttccactacagggtctctgttcctgctgttctttccgttttcccaacattttttctgcccctatcccacgtctttctttctcttattctaacaaaacacacttcagtcctggtgcggtggctcacgcctttaatcccagcactttgggaggccaaggcaggcggatcacctgaggttgggagttcgagaccagcctgactaacatggagaaactccatgtctactaaaaaaaaaaaaaaaatacaaaattagccaggcgtggtggtgcatgcctgtaatcccagctactcggggtgctgaggcaggagaatcactcaaacctgggagatggaggttgcagtgagctgagattgtgccattgcactgcagcctgggcaacaagaatgaaagtccatctcaaagcaaacaaacaaacaaacaaacaaaaaacccatacttcttctaggcctatttactacctggctctcaactcgtattttcactcccttaactagctctcctgacttcctgagctcagtttcattcctctgttacttgtatttgaagagccatgcgccttttgttgtattaagaaacttatgtgcttgtttgaataatacctgtctcccytactaatctggatattctgtaaaaactggggctgtttggatttttgttcatgattatgttctcagcattggttcactacctgatacgtgaaaggcatttaataaatgtttaatgatctgaggggtcaagagggatcactgaggccagtagtatgatacaaatctgggcaacatagtgagatcccatttataaaaaaaaatagctgggcagggtggcacatggttataatcctaactatttgggaggctgaggcaagaggattgcttgagcccagaagttcgaggctacagtgaactgtaatgatgcctctgcattccagcctgggctgtatacaggacaggatcctgtctccaaaaaaacgaatgaatgaatgactaaatgaatgcatgaatgtggaatgaaggaaggaaagttaatttaaaatttaaaaaattccaagaatagaaggctgtgaatttaaaagccaccaaatactacatcgtgaaaaaagaaaagtggcaattttactctgaaattttacattttctttggaaaatgagatggaaaccattcagaaattcagcaattcagcatccagttggcacccacaattagtcatcttctttgaagtgtctgtttttagagaggtttgctttgataggagtcactaaatggcaggctgatgggagtaccacatcatatggccaaagagaacatcacccaaaggctccaagtacacataaaccttcctctcaatatgtagttgtctgaatgtttctgtagaagggaagagtccttttatttgctgcaaattgtagctttggaaccaatagtaaaaagtaatttccaggagtaactatttgttttacattagctgaaggaaagaaggyatttaaaaaaaaatagcatccctcagaaatattgccctaaattaaaatttcaaaaagaaaagcaagataaagttaaattaaaagatagaaatattttgactttcttgtggtaataggaaatggagggtctttgaaaaatgtttaattttatcagttcccaaagtgtctgttggggatagaaagttgggccttttctttttcctaggcctccagttctccccaataagttggctccttgtttttgcttgtccaattaaccttttctgaaaaccaggaatttgagattgcatgccttgttcttaggagagttgctcaatattttgacactggtcttcctgtttgtgggagaaaaaatagataattaaataggtttatctattaaattatatagattacctgttcataaataactgccaaaaactaaatactatttggaagtaataatttttctggggtcagatagatatgggagaatgttatttttttccccagtgtttgatcttgctaggatttagacagaaaggagaaacctgctttgattttctttcatttttaaaagatatgaatatggaagataattcatgagttaacaaataatcattaaaaaaattattgaacaataatttgaagtcttctcacatcatctcttgtcctaagtgctggggtcacactggtgagcaaracatggtccatttggtaaggtggatgtacttagaatgatttcttcacatttatactcaygtgggatggattatcagttgcaagtgataagaatgcatgtcaaagtaacttcagccaacaggaggagttattggctcaaatagtggggataccaagcttcattcatggttggatttacagaatcatatattgttgggaatctctggctgtctttcacatccacttccttctgtgattcctttgttctctggaagatttcctttgtatggtgataaggacagttgcccagccacttgccaacctgattacctccatcyatcttattaayctgctgtcaagaaagccactctcttccagtggtttcaacaaaagtccttggaccaactcgcmcaggaaagatgaagtcagggaatggattattcagtttagttatatgcctgtacccagaaggcgccttctccaatcatgtgaactgtgagtaggtgaaaaatgattctcccaaaggaaaatcaggaggaatgctggatcatcgaaaacagcagaggtccattccatgtgctacattgtcatttcaggcatgtgtagtacttcctctttttcttgccaattgaagcaggtttacagattagtgctgtagggtagctttgcttccatttttattctacctcctccctcccgggaactgtttcatccccactttgttgcattcttaagttgaagtttgggtggcctcggagatccaagttcttctaacagctggagatttctgcggaatgtcaccagggaacctggtttctcttctccaggggactttttgtctcctgaagatgtggaagaatcttccctgtcactgaccttttactgacttaggatattactttcccaaaatatactcaggattattctaacctttgaaaggggaacatgggttgtgatgtttctaagggccttaatagttttctgtttctctatggagttgcaaagattatttcactttgacttatataatttgtcagtttaaaacaacaattatcaccaaaagatggtttttaatgttttcattacgttgcctccctatgcaatgaaacaaagaacactgtatgtgacatttataaattagccaacatgcttttgctgttcttcctgccctatgcaatgatggatgtttatttctacctagtttgtggagcccggaataaccacactgttttcagggtattacagtacccctgaaagctgtgagatccttcagatattccttttgtttcattggaatttctcttcgtgtgtttctatttagagctgtgaagtggcaggaacgggggcaggaaacaaacgtggattgacgtattggcacgttctttcattattttggcacacacaattttgagcagtctttctagctgatagcatgtgctgacccaaacttactttcttatttggttgaagagaatcctttgacaatctaggtcatccacgtacttttaccccatattcaaagaatcctccaactgtatttcaagtgctctggaaggggcctgaagccaagcagtgaatatagcagcacacatcccgatatgtcaagttagtgtttcaggtttgatatctgctggggtttgcagctctttcacccaagaactttaaaaggattcaccagagcagaggagagaaaggaagaatcttcagatgcttgactgctgtggcagaaagagtatcaatcgttacaaaaataatcttcaaccttttagcttcactgtgtggtgccattgacaagttacaggagatataccatcgcctgacatgaaaaagctgacttgatgaaacgcaggataatgtcccctgtcttacctttcaaaaacacggttcttcctttttcactttatcttctttgaaagtgaagtcaataatctcaacccatatgaattactgggttttattttctcctcccttgatgcccccaccctgtgctggcagagcctctggcaggcagagtggacacctgcttctccaagatcatttggagaggggattcttctttgagtcctggagagatatgcccaagagtggtccttcaccttggagctggcaagctcagatcattagcttgatggttggtattggcagagatccattaacaggaaccttgcrtaatcagagggctcatggacgctgttaatagacaatgtacttgaaaatgaagggtaaaatctgctccatgtgttagattaattacatcggcctaacaatcatagagaagcagtagaagatatctctctggagggatgaagtctgtcggtctcttgtttcattcattcatccaacaggcaattcttycaagtgtttattgccaggcctccgtctgtgtactgactaggagtttttggagtttctgcaactatgaacatcaaaatcagaaataaattcatagttaactatagcaacttgatcaactcaggacaagttgataacaaatttgtttattatttacttacttattgagacagggtctcactctcttacccaggctggagtgcactggtgtgatcacggctcactgagttctcaacctctcaggctcagcccatcttccccctccaaaaagctgggactacaggcgcataccactacacctggctaattttgctttttttctgtagaggtgaggtctcactgtgatgcccaggctggtttcaaattcytgagctcaactgatctgccttagcctcccaaagtgctgggattacaggcatgagccactacgccctgccacaaattttaattttttacaaatgttattatctaaagctagattctgagcaattctccactttcatggcaggataggcaacaggacaaaaatgaattttctgtgaaattaatgaagactgtgcagttcattcacagatatcagaacatagttgccctctaatcattcactaagcatcttccttcacaattattgcaatgcccagttatcctctaagtcctgtgtttgtaattcagttggtttatactagttgcatttctatcatgctacttactgagtttcctctattggtaattaagagtctaaactgcaaaatgcaaatatgtgtgtgtgtgtacacatatgcatgtgtatatatggatatatttacatacatgcacaaactttgattagataattcctactagaataagaggtgtgtttcaagtagtatgcaatgtattattttagtcaacaaatagttatcaagcatcatacttctattgttccagaagtgggatatctatgaggcttaaagtgatggtgacattcacaaaacacttgactgtgtatggcactttatttccacaagtaccaaaaataacacaaaacagattataggataagaggttaatgaggcagaactcttagaaaggggggaaagacagtctttgagcagaaatctgatgaaagtgaagactccttcatgtgaataactgggtagtgtcgaggggtgggagagttcccatgcaaagcatggtgtgtgtttggcatatttagggagcagaaagtagtctcacaggtgcatgactagagcaactggactgtcagccacatggataaggtcaagctgccctatcttgggaggcaagtacaaatagtttctgaaggcccttgctgcttgctcttcctattctctccttctcaccctagatataatatttggtattaaggtggcagggcactcccttaagctcaccaaagaaaatggaaatctagttagggaaagagaaaacaaaaatatgctttgcttttagaagagaaacccaggacatgaaagcaacacagttttatgtgtccatctgtctgtgacatttttaaacgtataatgtgaaggtcatagggtccaagttctggagatagattgctgggattcatctttgctgtctcactaatctttgtgtagccttaagcctgaattccttcatctttccactggagataataatagtaccttactttcagggtgaatctgagaattaagtgagatagtacatgggtactgcttagcacactgcttgacatgttctgagcrcttaacacatattggatgtatgtttataataaggacaaatatttgtccctggaagtttgaaatagcagccaaagatgagtatgcattcagttcttgtagtgtttatataatgtcttcaatttgtacataggaatagttggcccataattctgaaccctttggatgcataactcctcttccaaaaccttcctcaaaaatacatttcctgttcctaacacccctggttaatgcttctcttctacttacctcatgctttgacaaccctattttttttcaagcccaaattatggaaaaacagtccttacagtagaaacaagccaatgttagccactttttaattgattctcatgatttgcttaaacataatattggaggtagaaaaaagagcacaatattacaggagcctttccttgatgaatgtgagaaaaattggccttttgtgtttataaagtgagtttttatggaacagtagataaaaagagcaaaggaggcatttttgtaagtataaaaaaatgccatagatgtccggtgaaaaaaacagaagttgctgtaaggtatcacgatcctatttatgtttcacacgtaaatatacacacacagccctgaaattgttcaccgaggacacctctcagtagtgggacctgtatttttcccgttatactcttctgtattgtttgcttctaccaatgtcctttttatgttggtatatatgagcatatatatttactccttgagagagtaaggggaaaaggaatttaaggagaggagaagaggcagagggtgtactttttccctttgcttatttgagcaaagataggtatctttataatctcatttgacattcttagtcttagtcttcattttgtatccctgacaggctaccatgtctattgcaaaatattgtggtcttccaggctattctaaataatgctcacccataacaagttggaaataacatcacttatgacaatgagctgtacggattccccattcttggaagtggcatgaatagtatctcccacatgcattagtgactcccatgtactctttgtttccattctttaattcctaaagttcaccactttccaaatgacagttgcgctgaaggcactggagatttaagcctacaaaacattcttctggtggaaataacagacatggaaacaacagggtgaatgcttgggcaggcattcattcattcactgaatattaattgagcatctactctgcgtgtggtggacctagagccagggagtagcatcagcagcttccctggcacggtgggttttctctgctaacactgagctcacagcctgctgttcctgtttgtcatcatcctcatcacttccttttggctcccatctgactcactggactcattcaggttatttgcctggcttgtgaaaatgtctgggtttcggatctgtgatctaaactgcctaggaaattaaattcaatctgaataaaacttgtttttgcgttgtgactctctgtggcatttcacacaagtcggttgtttctaactgggttatctgtcctggaaaattggagtttggtatgccaacwggacagagccatagggaagaatggagatttggactggtacgtaggtataattaggcaaggaaataacttggccaaggtaaaattctgctttaaatgtactctcttagctttagattgaactatcccaaactaggagtgagggtggagaaaacactggcaaagcactggcaagcccagtggtaggcagatcaagagcactgagcacacctgtaggccaaataattaacctgacagctttataggattgctctccttstctctcacctcttttattttttttttttgaccaattactttcaataatgatggcaagtcagcatctccccctgactgcgttagagattggaatgtcaaaagggcctctgtaatgtcttctgtgtcttaataaacttgtcagttgaggttacattattttctaatatccatcacggaaacgtgggatggtgcagctgggcaaagatgtcaggtcgtggtgtgtgtttttagatgggtgtgatttgacacatcccagcagtgccatggctgcatggcaatacttgaaagaacagcctcttcttttaattagggccctgctgccattttggtgggatgtcattctgacacctgtttgtgctgtgggggctgctgataacctctcaacacctttggcagaaagttctgctgatgtgttaggtgtttggttaatgtccatcctgccagggattcatttcccctgacctgaactctgctggcattattttttattcaaaaaagcttcagcagtcttccactagctacctacttaagtttatgatctcccaccaaaccttttttagggagaaattccaaaaaaaatgtttttgttggaatcctgctttgagccaggcatgcccctgaacactggacatttaagggtgagcagaagccagcactgtctctgcctttaagaaactcattttcacgtggaggagatggtcaaagaatgacagaagcacatcctgtgctctggagccagtgctctgaagataaggaaagtgattctaaagagcaatagatcagtgtttcccaactaggagtgattttgtcctctagggacttctggcaacgtctggaggcatttctggttgtcagaactgaggggtaggtgctaccagcatctagtgaatgctgctaaactttccatgatgctcggtgcagaccccacagcaaagaatcacccggccccaaatgtgaacagtgttgagggtgagaaactctgctgtaaaccatagaaatctggcctggccagggatgctggagaggcttcctccagggaggtctgaagggtgagcaggagtcagcaaggtggcagagatgggtagggaacagttttcttgacaggggaaccacatgtacaaaggaaagcacagggggccttggaggaacagaaggaggcttctgtggcagttaacaggaagaaagggggctgatgtgtacgtggaggggtggtggttgtggactacccagggccttatatgtcccagggggtcatgcaggcttttcacattaggtgagatgtaaggggagttcaagaacacgcgtgtgggtaaaggtagtacctacctacctttggaggtgacatagtagcatgtattgtaacagaaaagagcactcattttggaggcagatacaactgggcttgaatctgtgctctgtttcttaggacctgggtgagtttggacaccttacttgacctgtgcagttctcagtttccaggttaggaacatcttacggggccatagggcagtgaaagagataatgtgtgcacaatgtcttttgcagaacttcccctcatgtcttcagtccagcctaggctaaagtcgtcttatccaaaaccaagagctctgtgtgagaaactaggacctttgttagaattttttaaagttctgggtcttgcctcaaacaggggtgctctgtaccctggaagaacttgctagttttgttgtaagcctgagaccaattctcataggaaagrttctatcaggtcttgtggttgaaatgtttaccttagtcaaaaattccaattataatccaggtctctcaatatccagggaagccataggggaatgatgtacttgtgaacagtgtttttagaagtttataggtaggagtatagcgtagtgactaaaaaatgttggctctgaaatcagtcatgggttccaattttaacttctcctcatattaattgtgattgctagcgagtttctcatctataaagaaggtaaaaatgaaatgcatttcataaagttagcattagaataagatgaagtctatatacaggcacacagtagggcatctgataatacagaatatttaacaaatagcactatcagaagaaaaccagatgccccactactatgatcccatggtcaacctgttttctaaatatttagggaaactgaggctggactgcacgatctcattggttacataaatgagtcaataaagtaatccagaaataaacaagcacttgagaatttgtaaccgacccttacttctggcatttggcctatattctacctcttctgtaakaaaggacttaaataggcaggtgmctatagaaaatgtacaggtttattgcaagagtaaaattaaaagatctacattggaagttattataaaatgacacaacaaaattttaaaaaatattgaaaatggtctctcctttattggaaacctaaaacgtaatgccctcaaggaagctttcctatgtatagtaatagcactagaatggcctttcaggtcattctgccccttcctctgtctcctcacagagctggacttttgaaatttctagggctttccatacttttctaacatttccccatacatttctcctggtgatctgtcctgtactgtggctttgctgttgaaaattctttccaacgtccggtttaccttcttcttgctgttagcatcagtgtcgcctttaatccaatctcagcagagaagagtgatctacttgtgcccattgaaggggtgactttatccacctgtgataatgcagtgagctcctggaggaagcaggcaccatcgagcctgatgcacattgattttcccaggtgcccctctttgtgtgtctccatatgctgattgtgactttcagccctgttttcctttcatgtagtagacatagaggcacacacctgcttgtttatttctgctgcttctgttggttctgggtttttttttcccccaaatgcaggtccctcctgagttacctacctcgaaacactctccatgtgcagcrtaccttctgttcctggcaagcgtcctatcccctaagcacactcctttgtttttcttccaggaggaatcatgcccttgaaagtgtcttctttcttgatgactaagtcacaccaactctagcagagcaggactgagctcaggccttaagggtagacttggcatttgtgaattacactattaataattgtgcacatgaaatacccggagattcctaagcactggcacaaatcaggccctaccctcatcacagttgtggaaattaaacatttattcaggattggccatgactatggcaggcaggcagacgttgtgccgttttgcttttacaagcttcgtgatgcccatgggaagggtttggttgtttcaactgccacaggcttttcagccatagggacaacgcagttggcaatgctaccgatttgccaccttttaatagcctgataattaaacatgatgggcagataaaaatagagagaccaaacatagccacacaagtcagttcttctgttattgtcatactcgttaggaggtatatggctgaaggacagaagccaagtcagattttaagtggccagaaactccgtcatatctttttgctattacaagaattttacaaaagaaatacactgtttcttgtgtaagaatatggattgcataatcgtcttttttttttgctttgtctgggataaagttaaaaatttcttaatgaaaattatcaggatcatattgtctgttgttcctacttcaggagaaatttgaatttgtattttaattaacctctctctctctctctctctctgtcacactcacacacatgctctcattctcactctcattcagctctgttttacaagtaacaatgtgttattggtttggaattgatttgggtgtcatatgttgtcatttgataaaaaacagtttagctaagctgcttgacattacaacagctggtaatgtcacttttgttaatgtctttaaccacatttttaacaaaacagcagatgctcaccacaaaaagccattttctttctctactcgattgtgtaaaatcagctcaactaagggctccagcttgagaagtcctgtgagtggatggcttgacctcagaagaagataggttttgaggttcttgattccttggcaacattagaacaacaacaaaaaagatagttgtaaaaacaatgcaaaataggtttcttctgtaggaagaatgctctaaaaatatggaaaatgtggtggctcatgaggaagccaggaagtcctggccttatgaccatgaagcagcaagttcaaatgagcagtcatggccatggtgtgggagaactgcgttccatctagcggttggaggatgtcatcatcacttcggaatctctaatttttaggggaaaacatactaccttttcctcttccctctcttcctccctttcttaaccaaggcattttccaccttgtaaacatacacacacagacacacagacacacagacacacacacacacacacataagcacagaatgggattagttttctgaaacatttgagtcatgcagcacagactttaaaaatttgccccgaaagatttccgtcaatatgtttctctgtatagcagacatcttagttttaagtcttatcctatgtccgtaatttttactgccttgtttgtatttggaacaaggcagtgtagtatcatgcaaattatgactctcgtttgctcatttgtgcacgcattgagcggagtgtttctggagccgctgttgagtgtgaggcaatgtgtcctcatggttatgagcatgttccctggagttagagggcagttatttggtgtctccaccatttattaacctagtgacttggggcatgacacttggctcatttgtccttcagtttcctcagctttgaactggggataattctagcatctaccatgtagattttttggatggataaaattatttaatctgtgtaaaattaatagatgtataaaagcaatgcctggtgtgtggaaagtgctaaaaagcattgagtgttactattamtgtactaaaaaggtagattgctaagaaggtgtgtgctttttaacgtattgtggtagactcttcaacttcctttctacccccttataatttaatttaaaccatacgaaaattggcttgtgaggatatgtatgggggagagaatcttaccctttctatataaaaaacacacatcggctgggcattatggcccacacctataattccagcactttgggagaccaaggtgggtggatcctttgagcctaggagtttgagaccagcctgggtaacatggcaaaaccctgtctctgctaaaaatacaaaaattagctgggtgtggtggcaggcaccggtagtctcagctagttggagggctgaggcaggaggatcatctgagcccaggaggttgaggctgcagagagccatgatcgggttactgcactcccgcctgggcaacaaagtgagaccctctttcaaaccccctcccctcaaacatatacagtatatctgtggaattaaatggtggggggtgattagaaaaaaaagtctaaagaggctccttggggggtaataatgaaaaaggttagcaaacattagtataaaatcagaattaatgccctctagctagagacctccaggaacacacttggaggtgaagttgggttctttgctcattgcagtgagggagaacacataccacagagaaccatagcatatctcagtaagagggtgttagaacgaatttggagttcakttgggtgatttgggggagagtctaaggaagggagggagattcattctgcatagggtgctgtcacaaagtggggataattttatgattggatatctcacatctctaaagggaagacagtctaaagtgaggctaaacctgtttttcataatgaagtagcagtcactcttagtagctaatggacggggatgtttggtatctcaggagttgtgcagtgaccttttctttgtctgcgcttagagaaagtatgaggccgggcgcggtggcttacgcctgtaatcccagcactttgcaaggcagaggcgggcggatcatctgaggtcaggagtttgagaccagcctggccaacatggtgaaaccccatctctactaaaaatacaaaaattagctaggcctggtggcaggtgcctgtaatcctagttactcaggaggctgaggcaggagaattgtttgaaccctggaagcggaggttgcagtgcacagagattgcgccattgcactccagactgggcagagattctgtctcaaaaaaaaaaaagagagagaaattatgaaatagtcttgttttgtcttactttatcatggtctcagagtgggttttcttgagctgtttatgttctgtgacattgtttatgcccagcaggataataatgtggcctggctatgagtgccaggttagtttctaacagtgaggcccagctatatgtgttgagcagtttccagatgtcaagggtttgcttttttcttctttygttccttatcagaatacttccatctgtcttgccaaagattcaaagatgagctggtaggaaccaatttggaccacatagtggtaaggagaactttgctcatgcttctaaggaagaacaactagtctctttcaggaaccgaacaaggaagcaaagagcaccaattgctacatgcagccatctcatcaccattcagggaactagcctgaagacaaagtcttcacaaggtcactaaagcaaaaagctcagaagatctggggtcacccataacattgtgaggtcactgaatctgcccgatctctacacttcctattttgtgaaatagtttccagttcctgtggctgcaaacatcctgagactcctttgcaacataattccaggaataatttttgaaaatatatgggagaagatgatggacttattcactgtgcactttcctcccaagtcctcttacagggtaatttgctttttaggtatcattctccaggctaaacagctcagtgaaagtttgcttcttctactctgccttttcctcagagctttcacctcgaagctcactgctgcctgtatttagctagtcccacaccagactgcttgggatgctaatacaagagctattattattattttttttcagaatatcatagaatattcaaactagaagggacataagaggtcatctaatcaaaactctcattttaaagatgagtagacagccagccagagaattgtgacttcacaaaggtgaagcacctactggtagaacaactggacttttccacgttgcggtagatttaaaaaaagctcttgatgtgcctgctaccatttctgagtcccacatccttggccgacataaccgatcattcactgtggtctttcgtaccatgctttcaggcccttttgcatttttcaatccattactctagcaactcttagcagccagtgattgttggcagaggcactgaaaccattattacatcatgtgcacttaataaatcaataaatgtttataaataaaaaatatttataaatcagattataaatgagtattgatttattaatcaaaaatgtataaatmcatatttattttccagtaagggatagttatttaaataaagatatatcttaatcataagagycgtatctaacacttctattttatatatatttaatatataactacatatggaagaagtatcattttgctagcatactaatgcacattgattaagacccagcattacttttgttgccaagaggacagagtcacaattcatacattagatcaaaacgttgaagaggaatagattggcattattgaaataaaatcctcaaacattttgctttatacttatttatttttgagacagggtctcactccattgcccaggtgaaagtcagtggtgcaatcatggctcactgcagcctcaacttcttaggctcaagyaatcctctcacctcagcctcctgagtagatgggactacaggtgctcaccattatggccggctaatttaaaaaaaaatttttatagagacaagatctcactatgttgcctaggttgttcttgaactcctgggctctagtgattcttcccccttggcctcccaaagtgctgggattccaggtgtgaaccgctgcacccagtcattttgttttgttttaaattttttaggattgtatctccgatgcaaagctactataacatctgagttttaaaacaattagacagcttaattttaaatatctaatttttttttttttttgagacagagtctcactctgtcacccaggctggagtgcagtggcacaatctcggctcactgcaacctctgcctcccgggttcaagcaactctcctgcctcagcctcctgagtagctgggattacaggagcatcaccacgccctgctaatttttgtatttttagtagagaaggggtttcaccatgttggtcgggctggtctccaactcctgacgtcatgatcctccagcctgggcctcccaaagtgctgggattacaggcatgagcccccacacccggccctaaatgatcttttttatagtgttattttttaagctaggaaacagttccaatcttgcaatggttactaagcaacaattaaaatgaaatctcaatagatttttaaaactatatttactttagaaggagaagtgtgtggcttttgcacrctttatgtctcttggcaataagtaacactggggactgagagagagggagtctaaaggagctggactttacttgggtgacggttgaggtggaggttggagtggggtggatggcccttgacatgtgtttgttacttttcacttctgcgattctccacaaatcacaaacagcaaacaaagctaacgcatggagtcaacgtggtattctttattagcagtaaatgaatgtcagaaaaaaaacscaggagactgctggattcaggagcccattcctggatcaatcactgtgctgagtattggggtatttgatggcccagccttgcttctgaccctctctctggctgcttgagggaagagttgcaattgaccacccaaccaggcccacatggatatgagagatgggcagttctgcaaaggcaaaacagtgttattgtcagaattggggaaggacactgggcaggtagtagtaatggactgttccaggcagcttcgcttcaagtcaaactttgctgcgtggggtagttggggagaaaatgaggggtgggaatagtgtcctgtttttgctgtgtttggttcaggatctgttgctggcttgaacctgctggtggagcaattcagggttcaaagaatggaaagtacacagacaagagaaagaaaaagcactgacagccgtgtgactgagattttctgtttcacactttatgctcttaatggagaatggcaccagctctgtgactttttttttttttttttgactctgtcacccaggctgtagtgcagtggcatgatcatggcttatgcagcctcgacctcctgggctcagatggtcctcccacctcagtctcccgagtagctgagagtacaggtgcatgcctggctaatttttttttgtaaaactgggatctcactatgttgcccagattggtctcaaactcttaggctcaagtgatcctctcaccttggcctcccaagatgctcggattacaggtgtatgtgagccatcgtgcctggtccttattcttgaacaacctaacttggtgctgggattctttgcaactattagagataatttagtatgatatttctgcttttctttctgctattgaatagtttaaatataaattgactgtttgcaagaaacaaatgcttcatataggcataagtaaactgtcacagagattatgtagtagaagaaaatgattaattgtgccttttaatcatagttccattatcatatgaaaccgtcatgtcattggacccatttcactaatgaaggtttagcaccacgaagagcatatttgcattaatgaggcatcacaggttattaattgaaatctaataacagcttggaatattataagtttgcattaattggaaayagaattgtggatttgttggcaatatacctsttgtcatcttagataaatgattccttgatgggatataaagaggccatttttgccctgattggagtttctagcttctatatgttgattgtaatttaaactggaatgacctttcatgactgatttctaaagcagaatttttcggtatgcctgatgccatccctaccatggcctgtttggtttttgacctgttcatcagccacctactaaggaaaataatatggattgaagcatgtgtaggtcaaggaaggaatgcttattgactcatatatgccggaggttgtaattttttgaatttttgcatgagtgaaaaatcagaccttggcgatgactttgagcagtaggatatggataactcccacatgcttggcattccagtaatggaacactaggcmtaagtgggttaatggcagttctgttactaacttactttccagggaggccttgcttggccaccctaaacaaagaaggtgccttcgttattctccattagtgcccctgtttgtttcctttagagtattacacttatagtcaatcataactttgtttgtttacttgtttttagtgtgtctctcttactagtatgtcatctctaaagaacaaaarcagtgtctatcttgttcttcattgtatgcccagcacctagcacaatgtgaatgtgtagtgaatagctgttgaatggatgattgaatcctggccagggctggaagggcctggggaagggggtttccaccaaaagcaaccatagttatttcagtagagtttaacccctagatctagagcagaatgataaaatgccagacctaaaatttgccctaaaatcagcctgtgtccttggtgtttttatttcataaacgtggccttaggctacttttggacstaattctatctggattggtgtccctaagactgggaagaacaaagaaaagcagtgcctgggtattgtgccccatggcaattgactgagagctgtgttttctagcattaattaatgaagaattttgtagaaaccaatattcatgataaacytcaaaatagaattttagtgtaatgactggcactttggtcaaagctaacagaaaccaaacaggtgggctcagctgagtgtagcacctctttctcccccacctcctcttttttttttttttttttctggtgaattgtgagtgaaagttacctttctttcactcggtttatcttaaggaactatgccatcgtagaaagaactttgaagaggccatgagaaaacacaggttctagtctgggttttactacttaataactggagacactgagggaaagtccattttctggatctgcatctggaaaacagagtcatcttatccatagtacagaatttttatgaagatcattgaggaaaataaaggtgcttggtaaattgtaacgcaaattcaagatgctgctgttagtcgtgtgttggctgaggaggaaaataaacagaggcagtgagaaagaacttcacagagactgcttgagttgactcttggttaagcagcagcccttatttcttcatcacactgcatgtccaggatttcacttggccttcctttagagctttttcttttgtagctacaaaatgagcatgaatggatcctgaggttgtaccgtaagcaacttagagacctccaaattaaagcagggagacatcatgttttaamctacaggtttggraatgatttttaaaaagttataataacttatatgggcaggggtgcaaatgaataggcrttcttacaccctgctggtggggtacggaaagcccagatggtataggttatagagaaggggatgtgtaacatgccattttggcaaggagtcctggcagatttttaagagaactgtctttgtgtacttttcaaaacatgttttcctttgttattttggggttcagagcatttctttgaaacttcttgaatctccccttgactggcagcctgttagttgatcctccatttgtgtattgtgtgaaaactccctgtggcagaaatatacacacacatgtcttaggtattcataccctgatctcttgaccttctggaagtagctgcggcctgctttccctcctggagaaacaaacaactcaatttgtttctgctctctggttagtgcatcacattmgtaatakctacaataattttttcaggtaaaaatgtagtcaagttgttgaagacatgagagatcagagtagtttatgtgtgtacatacatgtgtgcatgtgcttcctacgagctaatagatacttactcctattacacagcctcaaggtaagattaccttgcaggcaaacttttaaatatgtaaatatgcttgccattcattgattatcaggttttcaccaaagggaaccaagaacaggtgcccctttagccacattattagaccttgtaggatctgaacgttggtctgtgttgcatcatgttgttggaagattcatttattgattgattcatttattcaccagaaatttatagagcaatttataggtgccaggctctatgcttgatgctatgattcagcagcaaataaacaaaagtacttgtgcccatagggattatatttcagtggataagatggataatcagcatgtcaacagggaaattatatagttgcaggtgctaggaggaaaataaggggatagtgagtattaggaaaggggccttatttttgttaggaggtctaggaaaaactttttgaagatatgagattggtgcagtaaactgaatggattcaaaagggagaccttggaagtattaagaggaaaacaattgcaggcagaggtaggaaggtttaaagcccccgaggagagaaagatcttggaatgttgaaggaacagcaagaaagacagtggggctgaagctttgtgagagagagggagagtggtaggaattgggattagatggatagggatggggcaaatcaaatcgagaagaccttgtaagtcacggtacagattttgcaatgggaggacgttagaggtgttaagtagtgctgtgatctcatctgtttatttattttttaaaagaatttactggttctttgaagaatacattgcatgggactaagtttggactgattaggaggctttggaagtaactcagaaaacaggtgatggtggtttcaacttgatgataatggtgtgaatggtaagaagtgatcagagtcttgatatgttttgaagatattggaccatattatattcaggaatgtaaactgatatgataaagtcatatcacatgattatataatttatgtactgactttagaacctatttttttgggtaagataggttcatactattcttaaatctgactaaatgggtaggaaattgacagaatttcaaagctgtaataattctcatgtccagtcttttacatcagagttccttggatgatgcatgattctctcactaaaaccgtgaaaagatgccagtgcaaatccatccaactttataactcacacaaacaatgtgatattgccatataagcatattatgacttgttgggggtctttaattccattgtgaagtaaatttcagttcatgctgatttttaaaaattaaatcctttttttttttttgaggcggagtctagctctgtcacccaggctgtagtgcagtggcacaatctcggctcactgcaacctctgcctcctgggttcaagcaattctcctacctcagcctcccaagtagctgggactacaggcatgcgccaccatgcttggctaagtttttatctttttaatagagaaggggtttcaccatgttggccaggctggtctcgaactcctgagctcaggcggtctgcccgcctcagcctcctaacgttctgggattgcaggtgtgagcgactgcacccagccattacattcttttcttaaaataattaaggtgcacacctatagtctcagcgactttcgagactgaggtgggagaatcacctgagactaaagaatgcaagtccagcctggaaaacatagtgagcctctgtttcaaataaaaataataatcataagtatcaaaaagtaaccaaagccagatggaattctgaagcataaatttctagtgtttgccttatggggtgagatcattgccatatccccactagggtaggggcaacagtgattgactccaatatattttatacccaaggagaaattacagtaccgtattcctaacatcccattaaatgcttaaaggcaggccgggcacagtggctcatgcctgtaatcccagcactttgggaggccaaggtgggtggaccacctgaggtcaggagctcgagaccagcctgaccaatatggagaaaccccatctctactaaaaatacaaaatgagccgggcgtggggggcgcatgcctgtaatcctagctactcaggaaggctgaggcaggagaatcacttgaaccccagaggcagaggttgcagtgagctgagattgcgccactgcactccagcctgggcaacaagagcaaaacttggtcaccaaaaaaaaaaaaaaaaaaaaaaaargcttaaaggtttgccttttatccagcctaaccagtggtggcaggatggctgcagaagctccagcagaagacattatttctgctgtagacattacaactctttcattatagctcctgtagacatcctgagagtcaccctgattagaatggattaggtcatgtgtctatcccacagcaaatctctatgggtaggggggtaggggggtaggggcataggggagtaagatgtgcctcttagcttggcctgaggcacattcttcatgtctaaggatggaattctactgcgaccttatagactgagaggaggagatgattgaattcccaaatgatgtcagggttgttgctggaggaggaggaaaggggctatggggcaacagatgttcattgccctttgatggcaccgcagcaccttcaggctacctaccctctaaagcatcttccagataccatggagctccggaaccttaggtttaatggcagatatattttgatcaaaataccatatacttgttttctcatttgctttgtgcttacaaaggacaaagacaaaaccctagaatagaattttgcaagacaactccatagaagaattacccttttgttttcaatacagtccatcaacattgatcctgaaaaaaaaaaagcatgttgaagagtatatccaacactattctatttctgctggtggactgtgttcctcatacaaaattctctcttggagttctagttgatggtgcctatttccatagctttcctttctaaatcctatggcatagatgacagaaagtaaatagaagaaatgccaaagaaaacaaagaaacacctatatttaatttctgacaccagtggtttcatgtctttcacgttcaattaggtgagttgtttgaaggagctggtttcgagaagggttatagtgtccaaaggaaattattttccctggcatgtcaacaactatgatagaaatactaccagaccgtagggaacctcctcttgatggtggaaggaggcatgctcaaaggattactgttcaaggtcaaagagcagcagctaataagcacaacagggaagaaaggacagcagagtgaaaattagggtcacgtttacacttactttgttaaagctaaatttattttttaagtgagaagcactgcctttattaagacagttaatgcckaagaatgaatgaaaatatattgaaataatgtgtctttctcttctgagcaaaggatgtaaacccaggctttaaaagaatcccaaggtcttaattctgcaagagacattcttttatcttagttatctttccttattgggaacactggcagatatttggtctttaactacggtgtggtgtaacctatatcaattcagatgcccatgtctgatggcctcctttgtgtatgcagtctggtaaatctcccttaacacatctatccaactaatatttgtgattttaaataaaagatgttaccaagactatatatgatatttgtaaaatatccaaagttaaaattctaccagaaaggtaaagtatagtttgctaggataaaaataaatactatacagattctcccaaactgtacccacacttacatttcactaggtaatgctagaaaatggttattttccctattttcaaacaattgctgcatccctgacttgtgcaaagtactatcatccagtttgaaagactattaccacatatgccatttatctatccatatggcatgtatagtatgggactctagggtttattgatatgtgtaatgtataacactgaggaaataactgccatttagcatttctttttccttttcgcctctggaattgtaggtttacatttattttcttgtgaatgtggctatctcttcatgggcagtaaatattagtattttgggaccctcctcttagtcttaccaggcaacatttgtttgctttgtttcctccattaatctagcacatcccatggaaagaataatttactattaaacccctgtgaggaaaccccttcaccagtgaaaataacttagtgataattgatttcatcagagccttccaccttgattttccactgtcctaatagtggcctggcgaagcacttgagtcccatggtgaaagaaagaaatgcacaaataggcctagacttgtttccccgaggtcgttcgacaactgcaccgttgctccatgaggcacacattcagcaattagcaggcatatgtttccagctgactgcatctagcgataaagagaagctccgggaagatagcctaactcaactcctttattcttagggggaaaaaaatttgctcagggtttcttggctgtttccttgctctttacttactcttttgttattacataaatatcagtgtataaacaaataggattcaaagaaattctgtgaccaagcagtgaaagacctatgcagtataaagccacagagtctgctgcatccctacctgtcgcatgttgaactttcacctctgtattatgacacccacggtggcggaggtgggagcgcaaaggcactgcatcctttacatcttgctcctatagtgcctcacagtttgagggcaggatgtatcggtttccttcgaaacccagagctgctgcagtctctcctcttgaatcgtcagttaagacttgtagtttgaattaagagttcttattctaaaatttgaactctatctcatactcggtttgtaggtgagatggtttctgcaaagacagagagttcaaagcatccttttggctttcagtcctgaaagaggttttggaaagctttgtattgttggaggctttttcctcctggttggattcattaatacccttttgtgagtactattttgcttttttagaatagctttttctaaacagctttctctggtggaaaatccaatttagttgcaagcaatattaccagttccgctcctttatttttcttcctcagtgaaaggaaaataaaggattgcgtgtcaaaatggagatgtacgatttatggcattagcacttctattaataaatttatgcagcaattatatatcttcacattttatatytatttgtaactgaagacagcttctttatgttgcaagagcatatttttcttcaaaacacattttattttcttggatcttaagcttttgttccggatttccatggatagcggacgcatggtaggaagttttagctgctttacacacccagaaatggagtaaacttttgctgcagatttaatctcagacatgttgaaacttggatggtgttcatgatgttcatccgcacagtgcttctttcttaggagggctacacttaccccatttcagrcgagtcctgcctcatccaaatggtttgaacgtagctacccccattctctctagctcccaaactgggtgatcagaatacttcattcctctgtggtaatgtktagttttaagagggcagatccaaagccaacctatttagagccctctgagaacattcctctgcagtcatctttgagtaaatctgtttgagaatgaaatcagatgaagtaaagcaggaaaaagagaagagaggatggggtgtttatgatattgtttgatagctggatctagtatcatgctggggatggctcatcccagcatacaatagcctattgttaaatgttcaggaattctgtgagctggttgacagcgtgttggtagcttgaaattggctgcaagtcagccccctcctaccccctgcccttttttttttttaaatgagtatattgttaaatgtttaccagcctcactgcctagacctatcctaaataaagtcacaaggcttcttgtcatgtgagcaaattaacctctattccaccctcctctccttcagtttgactttggtttgccacatgcaattgtaagagatttggactggctaaattatttattttgccattatgataaacatcttccctttatggtgtagattagaaaatatgaggaaaccaatacagcttttgatgacaaagctgtatgtccctgttgcatgttaaaaaatatttgaaggaggtaatgtgacatttctagaacttttgatggtttataacaacctgacagattattcactgttcttggggagcccttaattggcaaagaaaacaataaaatctgttttgtgaagcagtggtgactgtcgaagatgaataatctttgagggaaaaaactaggtaacctgaagttttgagacagaattaatagtagagatggtcttgtttctctaacatagataaaggggaccaggataagtgtggtttaagaagctgctcattgtaagggtaatagtcagttgagtcaaactggtatgtcagctaggaccatctattttgttactttgcacatgtgaatcctatgtttgtttccgttgctgataaatgatgaatatttgagaacagaatgcctatgtcatagcactgcatgattctgtggagatttagtgcctttaaacagtcccacaggtctgtttttagtcatctgaactaaattggaggcaaaatgcattggaaatgctcatatccagcatacactgggtttgaatttaatttctaataatttgttgctggctattatgtgccccccacgccactgtagaaaatcagtagaataatgtacaagcccaagtggtgaagcttgtacataatttacatataatgtgactgcagaatctgttatctctttgaggtagcaacagaaagagaaaactacctaaaatttagacaaaaaaccttgtgtattcacaatgcaatttccaataacaccgaggtctgtgtattattttcagtagaaagtaattcaaaggacaaaaaaaaattgtaggtggacaatctaacagtgagaacatatgaataagatttcaaatgggttgagagttagttgaaggggaatactgagggatttaggtcaaagtctttggaataaacctagaccattgggataatctgaaacaatatcactggaattgatgtttttttcctccaaatcatttgggaggtgttcatagtgcatcacacgccctttatttacaaaaagtgctttctatttggcataatattttcacagaccagttgaagttacagaagcttcatatttaagaaaagaattaaaactacaatcaacagccagataggagaaatacattctggtattttattgcatggtagggtgactatgattaacagtaaaatattgtttattacaaaataactagaaaagaggctattgaaggttttcaccaaataagtgcatgaggtgatggatatactaactaccctgattggatcattacacaacacggatatgtattgaaacatcaaattgtaccccgtaaatattatgtacaattataatgtattcattaaaaaatacataaacattaaaaaaaatcttcagttaactgagaaaatgttcaagacttacctaaagcaaatactaatcaagtttacctgttctaattttgcctgagagcccctgtcaaacaaggtggtgcctttgtaactatagccaggtccctcagtctctccaagctccagaatacttgcctgtaaaagcaaaaggcaaagttggttggagaaatgaataaaaataactacctccttgggttattatgagtgttcaatgaattgaatgaaataattgatgcttagtgcttaacacagtgactagcaccatccatatcaatgggattcagctattactattgttattagagttgttagttggtctccccagccttgctcatgagtttcattatccatgtgtaaatgaataagtccccataacaacttctgccgtatggatgctggatagctttgctcatgtgagaagcaactcaaatcaacacaaatcctgtgggacatctgccctgatatcttttgaataaagcacacatttgaagagactgatttctcagtccagtgtgtcttcatacacatggcagctctcctgagggccacacatgggctactttcatgcctagtgttgttactttggaagccgttggtctctctttaaggtatgacctactgcttgcctccctaccccacctcccagttaattttgcttatgctgtatggcctgtatttggaggcctatgacctcaacctttatttaattttggtgactgtattccagagtactttcatttagtagggtgagtgacaaatttaatttatattaattgttgagggtctctgaaattacagtaacaaggttaataagtttagaaatcaaagttatgaagataggttatggtaagccatttagaaggcatactgtttgacttatagttggcaatagaaatactgctttaaaaagtgtcatcattttgttactgaatttgttttccattgctgcataacaaattatcccaaaactctgaagtttaaaacaataatcatttatttttgcttgtgtcttagtgaatcatctggggtttagcagatctaggctgggctcagtggatggctctgctccatactgctttgtgtttttcatctcccttagactagcaaccacaccaactatgtcacttacttctatggctgtagtggagatgcagcaaggcaagcagaaatgcttaagaccttttaaggcagagggtgagaactgagtgaagatgcactgtcacttctccccatatatcagggcctaaggaagtcctaggaccaagctttgactgaagaggtggggaaatacgtgtggccccagaggccatatacaggtgtggatacaaggagggctaagaaattgagtttggcaatgctatctaccgtggctatgatgtgcccctctgaagatttgctgcatggccttagttccttatgttctcggcctctaacaaaatcactgtactctctctttctgggcatttagtatattttaatctcacgaatattgaaaattgtgccgcagacccagttttctttcttgtgttggatgccagaaagctgaagacaaactagtagctgcttagagcagccatatctaagtgattcttatcctttgtcttgttcctgactctagttttgtctatgacatttgtttacttaacctattcttaaatattcttatcttgttaattcttaatctgttcttaagttgagttatatttttgtcttttgtatgcctcttaaattgtcttgcatgctgggcacagtggctgagcctgtgatcctagtgacttgagtggctgatctaggaggatcatttgaggccaggagtttgagaccagcctgggcaacatagtgaaatcccatctcttaaaaaaaaaaagaaaaaaaaaaagaaacgcaaaaatgttagccgggcatagtggtgtgcacctatagtcccagctacttgggtggctgaggcaggaggatcactctgtgaacccaggartttgaggctatagtgagccatgatcgtgctgctgcactgcagcctggacaacagactgagaaaccctttgtaaaacaataacaacaacaaaaaattaaaaaataaatagcctggcatcttttctggttcaagaagaaatatataaataaaattttaagcaacaatttactaccactattagcccttgacccggtaagtaaggttacaaataatatagtagtagttagcatttattgaatacttctttcctcttgggccctgtgcaacatattttttgagcagtacccaattcagttcccacagcaaccttatgagctacgtgctggcattatccctgtggaaacagatgcagtttatgtaacttgttcagggtctcacagctggtaaatatcagagtcatgatttgagctgataaaggctggctttagatcttacattcttgaccagttagttatactgctttcctattgatatgctaaaagaaaaggataacaggaatggatggtaattcttttctcttttcttgtgtccttgatkcaccttttattccttgcttaccttcttttttatccccccatgtctgtcataaatatgcctaattaaaatgtcaactgctaatagcttaaaaataccattttaaactctgacacttggcgttccaatcactacagtttaaacagaaaactttaaggatttaggttaatgaatatggtttatgaatcactgttaccagtacagatatgtttagcgcaactgtccttgtmtttatgatgaacataatccttccaggtacattttatgttttcttgctgaagtttgttggtaaacgtggaaattaaactggaaaatatggataaatcagcacaattccaaacacctgctcaaaacattcattttagtgatttaacagttgactctttaggatgtttttctaaaaacattggctctaggcagaataagtattctcagtgaatatatttgttgacatatcacttagaagctactacactgacagattttaggaattctatatgagtttgatgacaagcaaaggccattttagatgagagtgacttcctgttttactggctgattctcatgtatttgtatacttttagtgatgggactttctcgctttgatttttcaatatctcatttggctcagttatttgtaaagtcttcagtgttttttttttttttttaatgggcatcatgctgtctcaatatcattactgcacaactacaatcttaggaggaaactgtaagtaatcagttttctttcagaacaattgtaattcccacaaccctgaaaaactctgaagccattttagtaatgatcattttctgttaatcaattatctgtgcatttagacagggagagggcttattatgttttaattctcttaagaatgtccaggtgatagcctcatctcttccagttatcccccctcgaaatggctgcacagtagaygactgacagattgatgtcccccaaagctgagtttcattcttctgctatttagtcattgccatttcttcaactaatagtttatgtatggtaaacttaaaactttgaatttcttttggtgttaccagactgaaaccatcctagaccttctaagaaaaagaaaaagaaatttactgaccgatgayagctttgacaccctagatccgagtactcagtgttgttaagagtctgtgtctctcccggctgggcgcattggctcacgcctgtaatcccagcactttggaaggccgaggcaggtggatcatctgaggttgggagttcgaaaccagcctgatcaacatggagaaaccctgtatctactaaaaatacaaaattagctgggcgtggtggtgcatacctgtagtcccagctatttgggaggctgaggcaggagaattgcttgaacctgggaggtggaggttgyggtgagctgagatcacgccattgcactacagcctggacaacaatagcgaaactctgtctcaaaaaaaaaaaaaaaaaaaatagagtctgtgtctttccctccatgggctctgattcctccatgttgccttctttggacaccttgtctcatgtggtggtcattggccatacaatgttactatcttgccactagtagcaatctcagcataagagagcaactttttccccctcactgccaagttgctcatatcaagaatcccacggagaactttcattgatccagccatgtcatgtgccaaactgaaaccccagggctgaggtcatacccctcatgtgaatttcttcatgtgaggggagtagctgtggtttcctacaggaaaattgaggcactatcatcagaatgggagaatggtggttcagttaacagaaacaacatttgtctactactgtacataaatgtacaaaaatatgtctataggaatatattcttacaattatcaatctgtaatctacaattaaccaattttttttttttcgagatggaatctcactatgttgcccaggctgttgtgcagtggtacgatctctgctcactgcaaactctgtctctcaggtttaagcaattctctgcctcagcctcctgagtagctgggattataggcatgtgtcaccatgcccggctaatttttgtatttttagtagagacagggtttcaccatcttggccaggctggtcgtgaactcctgacctcatgatccacccaccttggcctcccaaagtgctaagattacaggtgagagccattgcgtggccayagttaaccattttttttttttaataatgaaaggtacttaaggtaaagagagcattttctcctttttaagtagatgattgatagtggaaggaacctcgggacgtaattccatacaacacgtatttctggagctttcgtttatgggccaggcactgtgctatgttctagaaatacaaagtggaatagcccctcctttcccttgacctcccaccctcatagtcagggggaacagtaaagcaggcaagaacatgaatggttacaattctgtgtgatcaatgagtagctgaggattgtgcaaggcttctaagaagttcagaagggatatctagcttaggctgagaaagcttctaagctggggtgatagacttttcatcatctggccttttcwtgcctctccagctatatcctccaccttgtttccaaatgcactcttcacttagtggtgctaaaccctttttagttctctggttaaattagtctgtcatgtttctgtgcatttactcatatacttggctttgccccctttttggttctcactccctttaattaggaatcagctatgggatggcaaatctgatgaagtagacacagtgattgagctctcaggaaccttgctagcctcctcatcacgtgccttcctgtactgaaaggcgggaaggtcaaacattacatttccagatgctttacagctaaggccctggatctgattccttgtttgccagttagatgcacttgtttgagttttggaagacagaattgagactgaagccaactttctgtattctctgtgatctttgctggctagaacattggaggagacatcgggcttttgggcactcatctttcagtacctggccactcagtgaagggccactgagaagcagtggatagagcgtttattttgttgctagtgtggctttcctataaagtcaaaggctgtgttggtgacagcagctttctgatccatgttcataattcagacagtctacttctaataatgattctgttggtgacttcctgagtctctgcctttctgatggtggcagaagtagtggtactcctcgtggtcatcctggatgtctttctagagcccacagcttcagctctttcagtgactttgaagcaccccattccccagttctctctgtacttcgaaaagctcaaccctgcctgaaaaacaracttacctctactgagactcagtctctatccaaaacttggagatagcatgacaacttatgaggttgtcatgaggatgcaatgagaagaggcaggcagggagcctagatgatagcatagcatgtggaacttgctatggaaccttgggtaaaaggttattattaacttgtgcacttgctagttttgtccattcaatgagaaaatttctgtctacaggaagcatcattgaactgaaaaagatgttttctttcatcttctcaaagaggagagacaatgtgtatttacttttgttgttgttgttacctggattcctagcccatcatttctcagtcacagccaaataactccaaactctctttgggttctagtcactcattcccttggttcacatgttgtgtacagatgcttagcatcaatcacttttcatggcttaattatctaactcagagttttgcaacttctgacttcctttgcgtcatgttaagaatagaacttccatagagccataagccgtgaaatcatgaggcagataactgaattttacagtggacgatcttcgattggagccactaagattgtgaagtaaacttcagtcttctcatctttaaaatggatatttactgcctcacaaggttaagaacatcaaactagacaattgaatagccctgcacacatgtaattcataatgctgtgcaagtggagctggtcaagataatgactaatgaggtcagtgggccacaggatatgagaagcatgtaaccattgcttttatttcaacggatattcatttagggtctctyatgtgtagatgttgcttaaatattcatttacactttgtgttgtcactttctttttatcatatacttaytgagtggatattcttaccctcattttacaggtgaagaggttgatccagtgctgacttgtctgaagtgatactgactgtgtgactctagcctttggcttatttccttccttctatccaaagacctcagatttcctaacagagtttcaggtattgttgcctacaaggacatcatgcctgacaagctttgtctccatcagtgtcagtgccctgatcagttccacctgaatcatgaagccagccctcatcacatagtcacatgattgctgaaacaagagtgtctggcagctagctacctagtcatattattctggagggagaatcacagatgtaagatgtttcctcagtttaactcacattttaattgttagttttctaaagttttgcttaaatgagaaagtgtgtttctgtctcactgaggggctttagaagctcttgtaaaaatgcattgtgtgttcctgggggactctcaccccgcctccccttcactttgcattatgaaaggcagtgagaaggaagttcagttttcaaaatgtcattaattattcttccaaggtggttctggcatcaatagggattccttaaaagaaaaccattccgctctagggaggcgaggtaccgttgggaaaagctgcttcagtattttcttagttaagtttgttgtttccgtgcatttggtggaaatgtaatgatttgttagttcttactacctgtgtattttgaaatagaaaattgtttgaataatacggctccttggaggtattcatgctaatgccaaaaggacactatcataaaaatttttcctagtgaatattttattctaattagaagaggtgaaatattaaaccaaggagatattgtacctcttatcaggtcactgggttttatttgccatgtcctgtgaagttttgagcttccttttttctagtatcagactgttactaatccatagggcatgtttgtataaaatagaaaaagatactccttttgtggagacacagytcccccacaaggtacatggcctcgtgagaggggccaggctggatagccccyaactcatttcgtgggctgatgcaatgtgcggtcttaacaactgcatgttacatctgcgggtaatagaaatcttcaaggtcctatgtaaggtaaggtaaggaagcatcattcctgaactcactgggaatttgggatttgtgagcatagtctaaaaccgaacccctataaggatagaaattggatagtggctcagccctcatgaaacggagttgtgggcaggtttgagacagaatggggaagaatttcagcattatgtggtatgtgagaccaggggttagattgtcttctagtggtagtaaagtatttctgagcaaagggtgccagataatgggtctggaatctgaaatttaagttgggtttgcacagttccacagaactgtttatttttctgtttatgggatgaagaagaatatatagcccttggctctgttagtacagttactagttacacttgcattcaggaaacacaaggaatggcagctgggaagtaaccttgacattgagctctccagatgcctccctcttctcctctccttgtgttgtgccagtggaggtgtgcttgtgtaaaatcagatagcagcaagagtcatatttgttgggccaacagataaatatatatcccatgctgactatgtgccagatgcaggtgatttagtcatgagcaagtctagactctgtacttgacctcatggagtttacagtttagtggaggcaatggacagtaaaccagcaattactcaaatacatatattgttacagatggtgagacgttttataaaaacacatacaggataaaatgagagcattgttggtggggagggggcgatgatggacagtttaggtggatttagattttgagccactctactgataagaaaatgtaggaaacagacaccattaagaatccattttgccccaaattcttctgtttgataatggaagtgtctgtaatcagcatgtgagaagatcagcattttgatttcaaagaagttgcttcagacatggtattggagtctctgctatgtcctttggggttgtgcaggctcctgctgctgagacctctgctcactgccactgcccgaggtgagaagttctggtaggtcagggttagttgcttttcctttctcagtacaaataagtcagtcgggttacttcatgtagaacctcttctcctctcaacaaatgttgaaatgtttgtgtttttctccccatgatgaggaaagaagcctggagaggctagaggttgcagctgttcaagtaaagttttgtgattaaaaccccattgtaggtattccacaaatatttgaatcaaattgatttgttagctccagggtgtagggatagagtctgggctgagctgtttgatctgcacagtttttctgcttgaaacagatgctgtgcttgaaacttaagcattttctcgcctataatcttatatttatgctatttgcctggtccctgaaggcattttaaggacgtgacgctgtaccacctcagccctgggtgccgaattgatttgtttgtatgtgaccctggtaatagaaaagcttcatcagtgggtgccatctttggaatctatctatcttttgaaaacattgcacctttgagttcctgtggcactgttgtccatccacttctgtttttctgagtgtcctctgactttgccctttttatttgagattcctcctccattctcagctagatattcactccctcactggcttccctttctcttctatcctttttcatctcctttcctccctccccccttttttcctgtccacctttctctttcctctactccatatttattgagtgcttgctctgtgcctctgaggctataccaaggcagactctgctggaggtggtaatgagctagtgaaagagccatagtaccacagcttgacaccacagagtgtctaaggagtacattgaaagagaacctcaactaattgtatcaagatacagctgactcatacgtttgatgacttgaaataagtgatagctattccatgtttggaggagcatgtttacgtgtctacatttgtcggtgtctctcttggaggattggctggcaagagagactgaacaggagcccattattgtggaagtaaaaccttgtaagatttgtgaatctaggttgagcttgactgcatgtatatatgtatatgagcatgtgtgttcatgaacatagtcatcatgttgtgtgtcattyacaatctatgaccyatgtaggtataaacctatgaagttttgtaaaggcctgtgggccccacgcccagaaactgtgattccctgctttttaaaaaagcttattggatgaattataaccattctacttgaaactatgatagggaataaatgtgaacaattttctaaagtagagaataaaaacctgccccaytggattatctttttccagatgtctctgcgactaagtgactaagtatgttacagaccataaaatgttgcarttttatttttgaacctgttttgcaaatactggaagtgtcatggatattttcctatctccaccttggcccaactccattaggcaattacttatgtttaaacttgatttctccagaaatatagttggatcagtgactgagtagtacttctgtcccttttctttaatatcatttctcctggacgggtcatgcttgaatcactctttttggtaaaacatggaaagaccttcacttacattgtgtctcagtggtggtaaaatcagtctttaacaaacagttaatgtaagaactgtgcacagtaataaataaacctaggattccagctggcacgaagtctgattttagattgaatgacaagctctacagtattttctttttttcaagggaaggggaaactgtcacaaaaatggaaacatgtttttttttttaattctttattttagatgctatttaaaatagtcatgagcatgaagtactctatttttagatttaggtcatttgaaatgcttcctcttttaggattaaaaaaaaaaaagtcaggaggagctctggcagaggttaacattggaagggctctgcccagtatgtgaatgggttgtgctaagctgccagagctgctgtacagcagaccatgtaggtgactctgccccctggtccccacactctcaggacaatcttccacactggggaagagaaaaagagataaagaattgaaccacaggggcctcccacacttctccctgtgtgatttatttatgaatcacattagctggtagacaagatgctgagccataccctttgcagatctctccctctagagtagaagcaggacatctgtgcttgccccaactcattccctgctctacccctccaggcaggagaagttttggcagggagctggctttgagcccaaaggattraaatgaaatttgccttttattactcagtttccagtattttattagcaagggaagaattgaagtttgtgggggtagagaaaggcagaaacacggagaactttggagtttctctggccgaacacatcagatttccagattcccaggcttggggtatagccctccttcatcagcaccagcccatgtcttcactgtccagcctaaggttttaagagccgtgaaagatgttccatctcaatcataaagaccaccggatttccattagctttttagtatcaatccacattaaatccctgtctcctggtagtctttcatgtttcggtaggtgtacagtcactgctatatttaaatctgtattgggtagatgtttgtatattaacgcttttagatgctatttcagtatgtcatttgtcttcagtaatctaactcaaaagcgaatttaagtgtgatgttcttttaaagatcactcaaatgtgataaaaggtgttagatggtgggtttagcaacaggaattttgattttaaaaaagttttctactatattatggtggattattctctggcattttaccttatttaccttagctgttgaatgtagatccataaaaatcagcatgacaataagccagcagaaaggtagagacaatcaggggaaaatgtacagagatttttcaaccatccagtaaatctcacagaaatacttatcaattcattagcccctcttagtcacacagaatatcctcacccatttattaacttttgggcataggcacaattctaaaagtatcttccaactagggatgatatattaaatatgttaaagggctttctccattcttttaacatctatcaagggcctgtagtaatgtttgccaataccattaacttttgctagccttataatttttccccccttttcaaatggtttacttttctttctcttaaggcaaaaagatctgaggtcatatgttcattcgtttaacaaatacataactagtgaccatctaacctgagccaagctctgagttaaatgcatgggatgtatctatcagcaaggccagctgctttccatcctcyggaggcttgtgtgatagtgagagaatatagttcacacacacacgtggagatggataacacaatgatcaatcagaattattatgaaggaaacaaatgaagagtgaagagagaataatgggcttgggtcagactaaataagggggacatggaaagctctctggaggagggttctgtctcagcctgaaagatgtgaaggtccgactgtagaaggcagatggagagagagcactccaaatcaaggagccagggtatgtaaaggttctgggttgagagaaagctaagctcagtctgtttgacaactggcaaagactagttggcactttatagatgtggagagcttgagagtgggcctctgaaacagtggaagggagttcagattttatttctgatgcaatgaggagtcataaaggggttttaagtgaggaagggacctatgtgattggctttgagaagagataggaaagcaagcagtgtggagaatggactgaggagggcagaggctaccaggtagaaggctgctgtctcagcagtaggggaagatgattggagtctctcctagactggcagcagtaggggatactgatgagttcaggcttggggacaggattgaaagagaaatcaaaagggccttcttaggcaaaagagaaggagacatatctgtgggtgccaccttatagcagggagaactggggggaaaggctgtagctgcccttattaggtaggaacattgttttataaaggacacagagcataggcagttttcttgacaagctgataatataatgggatcatatagtgcttacgttacttgaaagtgtgagattatatgaatctgtgcgaatatgagtattggttaaaaatggagttggacctctgtatccatgggctctgcgtgtgtgaatttcatccactgtggatcaagaatatttgggaaaaaaaccataaaaagtaatacaacaataaaaataatgcaaataaaaacaatacgttagaataactatatagcattacattgtgttaggtattataagtaatctagagatgatttaaagttaatgggaggaggtgtgaaggttatatgcaaatactataccattacatatcagggaattgagcaactgctaatttttgtatatgcaggggtcttgaaaccaatccaagggatgactgtgggtttgtgtgtatatatgtgtatatatgtgtatacatacatacatgtgtatgtatgtatatatgtgtatatatacacatatgtatatatgtgtatatatacacatatgtatatatgtgtatatatgtgtatatatatacctttctactggtttattgtcacatatgtatatatatamacatatatgtatgtatacatatatgtgtatatatgtgkatgtgtgtatatacatgtatacgtgtctatatacatgtatacacatgtatgtgtatgtatgtacacacctatacacacatacacacatatatatgtgtgtatataywcacacacacacacacacacaaacacacacacacacacacacccctattcagtaagactgtattttgaacaaatrtgccagggcttactgatgccctttcaagtaatttttggaaagraaataatttttcaacaatgtgggtgtttctttatttttgwatatgatttcattatttataggtcacatgcccagtgttttcatttttgaagytgtataaaaatacagatcagttgatatgagcatgtgatgcagaatctgtaacctgagagtcatgccgtctgagttccagtcttacatccatatcccatcaggtgtgaaatgactttacctctcagaacctcagttttctcagtgacataatgaggataaccgtggcaccttccttatggagttgttgtgagcatggatagtgctagttatagccagccgttagcctgaggcctgccatgcagaaaagcrcaataaatgttaactgataatagtgaacatttcagaattagaaaggtttcaagacatagtcttgttttaccctccagttttagagatgagaaaaccaaagccagatattacatggcaygtatcacacagctggttagagacactcccagacatggggacctttccctttgcacctttaatgattgctctctaaggttccttttcacttttttccggtagaattgattccatgggaaagaggaacttctaacaaaggtagaagaggaatggcatatcaccaaaatgcttagactgtgamtttggacatsgagtgtgtggtgtgtgtatgyaggtgagcgagagaaagagagagataatcctaaagagaaatgtaaaactctagaaaagggcacaaaaacagayacagtgtggaaagggtgagaagagacaggatttttgaatggaaatctaagcatcattaagaagataaatcagataagaattaaaagttcagtatattctataaaattcatgataatatattggatatcactaagatccagaattcaataatgggctgtacattaatctgagagggttttatatctccttaactttaacttgataacaaaacagatgtttatatttgggatgagaaaaaaagcaaagcaggatgaatgaagcaaagcagaaaacaaaaagtaaattcacttatagtagacttagggcatctcctaggactttacgtacataatatattactcagaagaaaaggagtttgatacagctttgttaagagcctcgaaatgtggatattcagaacatcaacatgtagtctaggaaagttttcagtttggcttcaaaaaccctttgacatggataggtacaaaagattcatacatatatttacatgtacaggacacttgttgaattcaytcagaggaaattctttgtaggaagcagatgtagaaatgtaaattgatgtgcttttagaaagagaaagaagaggccaggcacagtggctcatgcctgtaatcccagcactttgagaggtcggatcatgagttcaggagataaagaccatccctgccaacatggtgaaaccccacctctactaaaaagacaaaaattagctggatgtggtggcactcacctgtagtcccagctacttgggaggctgaggcagaagaattgtttgaacccgggaggcggaggttgcagtgagccaagattgcgccactgcactccagtctgggcaatggagcaagactctgtttcaaaaaaaaaaaaaaaaamaamcaaaaaaggaaagaagaaaagggaaaattaagtatagagtaaccaggaaggaaaggtgtgaaatcaatgaattatctaaattggaaatagaattacgttgttaaaaacaaactgaagcaattcatcttggtatctgtcctgcaaaatgaatgtctattatgtgcaaagaactgtgttaggagtcttgaggtatatggagatggaataaccagggagcttgcctcagaggaggtcacagccttatctgttcacctgtgcagtgttcattgagcatacatggaatggactatatcatttctatgtccaatccaaatcacagactctgctaatcaatcccagcactctttctacctgatgctcagttactatggtgatcagttggttgcagagtaattcttacttgccttctgggcatgtggcccagttctgccatagaagcagattggtgggtattgtttgctgtaatatcttgggtacttgccccagaattcagtgcatagtaagggtttgtattagtccattttcatgctgctaatagacatayccgagactggacaatttataaaggaaagagttttaattgactcacagttcagcatggctggagaggcctcaggaaacttatagtcatggtagaagggaaagcaaacatgtccttyttcacgtgatggcaggaaggagaagaatgagagccaagtgaaaggtcaagtcccttaaaacatgaggtcttgtgagaacttactatcacaagaatagcatgagggaacagccaccatgattcagttacctcccactaagtctttcccacyacatgtggggattatgggaactacaattcaagatgagatttcagtgggaacacagccaaaccatatcagggttcaatattcaattcacttattgaagtaaaacttatcttcttttagtcatttattctcatttcatattaaatactcaatgttgtttcaacactgatcttcaagttactctgcacttgtatatacttcatatccatgcatatacatgcaaaatttaacaatcttaatattacttgaatattaaagtcaaaggttttgctgactttgtgtaacttactaaggctaataaaatgtacttgcaggctgcatgagatggctcatgactgtaatcccagcacttggagaggccaaagctggaggatcacttgagcccaggagtttgagaccagactgggcaacatagtaaggcctcacctctacaaatgtatacatattggctgccatggatatatacaaatatatatattagctgacatggaggagcacgccaatagtgctagctactcaggaggctgaggtgggaggatccttgagcctggaaggtggaggctacagtgggcctagatcatgctactgcactccagccagggtgacagagtgagaccctttctccaaaaaaatagatataaaaaataaataaaatgttcttatttaagcataaaaaataagatgtatatcatttctggagagtaacttagtatgtaaacttgttgaatatgaatgaggttcatatcatggggagtttattaacaagtaatagccttgtgaagttgtagaacatttccagggctgggtggaaagggggaggaagttattttaatcacttgcagaagccatttatagacctgtcaacttttctgccatgaagattatcacttaattgtaagataacatgatttgctatttagatatcagagatagaaatgcgtaggctgggatcaaagtggaaatcaattatctaaaggtctgggtactcattaataaagttggtgcagctgtgtgcctgtcagcctcccctgggttggggtctattttaaaaacattgcgtgggctgagttctctggcctgtgggtcagagaggatggccacttgtaaatctagatgggatcgcttgtgtaattgggagattgcacaagtagaagctagtgataaggtacctgatctcaccaggcaggcctgaaaagtcctagaatactagagaagagtgtccaagggctctctcccttgcttgcctgcatttatcttgaaatttcacaggaaaaatggcagagatggtggttagaacaaaggccactagttacggaagcgcgcacctccctgcaggtattagctcaaagaggaggaaactcacaagccagttggtgagtagatatgataagagggcacatttcaggtctcctgaattttcacactaggctttctgaaaatccccagatctggcatggggagaaggattggggaaaatttcttatgactcacattgaagatccatttggcagggacattgttgaggtaaatgtggtaatacttcagcatttatgagcgtgtgctgtggattgggttgactctggcttgaatctgagttctgttgtgaatcaarttctgttggttgatactcatgtgggttttatatttccaaggtttggttttttgatttgaaaaayagagatgatgatagcaacctcaggtatacaacttctatagagcttgtatgggatatgtgtccaataaacggtagctgtttgttatgacagtggtagtagttagaattccatgagagatcatgacttgtttgtttgttactgtattccctaacttcaaacacattgtttatatcagacttccaactggaagagagggtacactcaactgaggctgcgctccagagaacttctttataaagggacgatatagagaggcactggtggggtttagaggaaccacaaggttagtacaggaacctggggatggtaagcagtggagttttaaagactcaagcccaaagggataaggtgagggagtggtactgcaacacagtaggagagatgtttgggaaaacagagtactttgggagaaacaggagatctctgtgattggggccttggtctgatctttctgctagatcagaccaagttcttgtttttcctctcatttggtatccttatgaagccctcactggccaacttgcaggrgaagccagaacaccaaggggcctgtcagtgtagtccacatagatcagccttctgcagcacagaacagagaaagaaggggaggaagagatttgaaggagcaaatggactgtcacagtgtttcacacaaagaggcctctcaataaactgttctgaatgaataacacgtgtcatgggtagttggattagattgtttcttcaaagcattgtttttttagtgtactcactgtgtgttagctgctataccagaaggaacaatgaataaagccaaatgcagtcctcccgagtgtctctactcctcccattttgtaagtacattacatatacatacgtgtgtgtgtacatatatatatgtacacacgcacacacatatatatacacaaacacatacacacatatgtatatatacacttttttttttttttgagacagtgtcttgttctgtcgcaatggcatgatcttggctcactgcaacctccgcctcccgggttcaagtgatgctcctgcctcagcctgctgagtagctgggattacaggcatgcaccaccacacctggcttatttctgtatttttagtagagatggggtttcaccatgttggccaggctggtctcaaactcctgacctcaggcgatccgaccgcctcagcctcccaaagtgctggaattacaggcgtaagccactacgcctggcctacatgtgtattttaaaaattaatttgcacaatttccctctaaggtaggctttattaccaccattttacagaaaagatatcctaatctctgagaggttaacagacttgtccaaagttgtacagctggtaagagagcaaagtgggaactctagaccctggctggctcttcatctccatcttgctccatgacctttggaggtcagcttcttggagtggctgctggatttctccacagagtggattgtgcagctggtttagcatgcatttcctttgagctaatggttgaatgagttcagtatataatattgtagattgtttcagctatatctattctgtaagagacatgcgtgagaagcatttgggaacttactaaaatagagaatttggagggccccatcagatctaatatgtgggttttgacccctagcaagatcctcaggggctagttgtgtggccaggctgacagtggactctgctttcatgaatcactgaaagcttggacttctcattttacaaattgggggagcaaagtcgagagagtcagtaatagtggcacatcaaggctagttggtgtcaaacatgggtatttttgttgtcaataaatcaaatcaatgccaaataagagtaacattagctaaggagtataacctaaggatgggtgcataaagcttatttggctgcattgctctttggtagacatgcttctgatggctaaatgtgaattagatgacactttgattaaagaagatgcagtctaacaacttatattgatatagtgtatagaacaaggggaagcactactccccatatctagatcatttttgcaggcaggatgcaggataatggagctgacttgaagtcacttatttcagatgagcatgggctgtgttataagaataggtatcyaaggatgaagaaagacacaaacatcagggaaaacagaagattcaagtwtttttttttgaaagatagacattttattaatgaacctggttttagggcagatacttgctagctcaagaaataagcctttctgagcataattgctacagggactgttgaagacggctagtcttcaaactggtctggtgtctctaggaggtacataaattgttgttttaaaaaaaatgtaggccaggtgcagtggttcatgcctgtaatcccagtgctttaggagggtgaggcaggaggatcacttgaacccaggagttcaaagctacaatgagccatgatcatgccactgcactccagtctgggcaacagagtgagactttgtatctctctctctctctgtctctctctctctctctctctctctctctctctctctctctctctctatatatatatatatatatatatatatatatatatatatatatttttagtgcatttctgttaatggaagtgagaattcagacaaaactaagtcgtggataggaatatactcatgtaacaaatatttttaagtgtctcattccaggttgaatgagaatccagtgtattctcattcagtagtatactatcactactgaagtataatgatagattataaattattttagcagcacttgcagtggtctgcttaatccactaaacttaaagtgggcactggcgttctctcatgattagagaaatgaagttgacaaaggaggatttcttaggtagctgctgaagcactgacagcagtgattgggtttctctactyatcatttgaaaatcaattcaaaagactctgtgttggtattaaaacacattaattctttactctttcaacgatattttagaattctctataatatgtttaatgaatcagagtatataacacatttgctttttttctccttaaggaacagccttttcacaacttctccctaagtttgtatttattgaggttactcagtctcttatagaaagataattcagagactgttattaagacaatgtctttgactttagaatgagtttatgtctttaaggatagttttcagcaaatgagccaaccatatgttaaatcaagtttaacatccattatgaaacactgaatcatactttatatttcagtaatgataacaaatgatcgcttatctcatgtgcttctcatttgtactacttctcatcaatcttgctaatactgcaaagatttatgaaatgaacaagtgtccaactgtaactgttaatattaatagcttctttttatattttctctcactggctttcttttccgtgcttgcttaagcctactttaatataggctttaaaagtaatagtttttcttactctgaaatgataattaacagaaaactaggaagtcagtaataaaattattttaatgaaactgcacaattataccagcccattacaaggcataggattgctctgtgctcagcactagaagccaaaatctttttttcacttgtgtaaaacagtccattttaaaactctggaaacatttcagatcccttatgacttaaaattgctacttgtgcagtaaaagttaaaatcacttgagtaaatttgtaatttaatctttaaagtttaactaacatttattcttcccttctaaatggtttcctgttggtgtaaattgtaacaagctgcctctatctttttctagacttcactgtgggtctttaagtcaacattccaaactctccccagccmaagtttctagaagagatttcaccagatacttttttctctgaggctctgagtgtctrtctgtccttygtgtcctgaattgaatgttttcaggaggggctgctttttcccataaaatgrtctcttagaggtttaaacccctcctctgttcttgtggctagacactgtttacctaactcctagatttttaccaccacctcctgttygagttccaagacgttcatgtttcctcatggattcatgtatcctgaattcctagcaaaacaaatcttgcccagtctttctgattcctagttttatttcatgaactcaaatgttccctgagggcmgggattcaacacaaatttgttytacatttcccacaattccctgctttgccccagacaacacrtatcataggatcttatctgttgatgtggttgtaagcaactctttgttaatgacaaacattatactaatataatgtttttattagaatgctgaacrcttctttctagagtaattagcagtacatttgagttgacagttgtgtgttgctttctaacgtctcttttattatctctaggcgtttttttttagttgcaatttctcttctgaagaaaagaaaacttttgtgcattctctcatttcttctatcacaatttaagatttgcaagtgtagtctgtttcatatttctcacaatacttaggaaagcagattatacttagcaggcctgataaattatccttggtttgagcaaagagtgaaataaacccaaatatattatttcttagttgactgtagatacaacattgtgaaatgtctcatagaattagaggcatagagtttcagaaagggaggcttggagaagggatatgactgataggatcacaggtttatttcatacatagttgttggagtgggaccaagggatggcactgtgacattaggcacagggctaatgtgtgtgtgtgtgtgtgtgtgtgtgtgtgtgtgtgtttgttttgtttgtttgtttgttttttgagacagagtcttgctttgtctcacaggctggagtgcaatggcrtgatctcagctcactgccacctccgcctccttgrttcaagggattttcctgcctcarcctcctaagcagctgggattactggcacgcaccaccacgcctggctaatttttatgtttggtagrgatgggatctcaccatgttggccaagctggtctcaaattcctgacctcaaatgatccamccacctctgcctcccaaagtgttgggattacagggatgagccactgtgcccggcctgtacacatgtattttcaaactgcagttgactgcaggtaactgaaaccatgaaaagtgaaacagcagataaagggggaaactatattggattgttatatacattattatagtcatattatcgattatatatagatcacattttactttagtagcattaatatrtaacagataattactactaataataatgttggacataggcttctgtcttcttacagccttgattgctgaggctagtgaaccattataggggtagtttaaattgcccacttcttaartggtttagtagaatgaagacatgatcaatgatttaaaaaaagttttttaaatgaaatcacaagaagatttcatgattctttaattatcttttgagggtttcaggaggtcaggcagagaatgaaactcttaaggctctcttatgattttgtggagaaagccttttaaaactcattgcacatgatataaacctaaaggcaaartttgggaactgctatgtgaagactgataacagtgtaaagttgttcgctgctatgtgagcaaayggtgraaaaaaaaaatcacttagctgagatataattaaagtaagaattaataacctgagacatttaagtaactgatagtccccaggaccayctttaggatcctgcagaagagagaatgagtgagtacctgtcttgaaacttgctagtttccaaaacttgcctattgctgaagatgatattgaatattttaaaataggctgttcaaatacttcctttaaaaaatgctgtttagaatgtttcccatttgatccacaattaagcttacattctcaaccctacagtaaatttttatactccagtcctcgctgctgtcgtactcttaatcaaataggaaattgcttccctgggtttggccaagttggagcaggaagattgtgcttcatcagcataataatacctaaaattatgccttccatggtgaaacctaataaaaatatgcaggtgccctgcatgggactawgaatttcagttcagtgaagttttatttataatatctttaaccctgcctcagaatcaattctggctttgttaaagatttcatgcttagcaaataactactacgtgcaggcactgtgctgatctctgtggaggaaamtraaatgattaaggcccagtttctgctgccagagagtttactgtccagttgggtggacagacaggcatacatcaggcaagactacatgctcattgtgctgtatattgtgggaatgctgagatgggagaaattgattttaatgagaggactggaaaaggttggtggaaggtgtgatgtkcaagctgggccttgaaagtttaawctattagaaatgtggtaacagtgccgtaagcttcaggaatgttgattaggctgattttttaagcagggaagaagcagctgatgactgtgataccagaaaggcagggtaaggacagatttcacaggaccctaaatgccatttgatggtatttgggcttgattctgaaagcactggggagccagtagagttttataaaaaggaagtcatggaatcaagtatgtgtttaatgaggataaatgtgacagctctgtggtagatttgattagtgctacactggagggacggttgaagttttaaaactgggaagggaaaaaagcctgaagaggtagaaattgagtcaccagtactcaatgagtggttagatgctgaccataggaggcaagtatatgccaacagtttatttccaggtttctagcacaggtgagtcttgatttccttacccgacacgatgacagtacccatacagggacaaaattaattcatagaaaaccttgtttcaaagaaacaataaatatgcaatacccctcccatatatcctggattttataatgctgttagttgtaagtacaccactgatttcatatwttggaaaaaatragtgcttccatattaaacatatcaattayaagatgcatcttcatttatttatgttaaaaacataaaataggcatcttaaaattaaagaaatataggctgggcatgatggcttatgcctgtaatcccagcactttgggaggccaaggcaggcagattgcttgaggtcaggagttcgagaccagcctggccaacatggtgaaaccctgtctctacwaaaaataaaaaattagctgggcatggtggcaggtacctgtagtcccagctacttgagaggctgaggcaggagaatcacttgaacctgggagggagagattgcagtgagctgagattgtgccattgcactccagcctggatgacagagtgagactctgtctcaaaaataaaaaataaattaaaaattgaagaaatagggtaatgaccctgaggttttttttgtttttgtttttgagatggagccttcctctgttgcccaggctggagtgcagtggcagcatctcagctcactgcaacctccgcctcccacgtttaagtgattcttctgcctcagcctccctagtagctgggattacaggtgcccgccaccacgcccagctattttttttttgtattatcagtagagatggagttttgccgtgttgcccaggctggtctcaaactcctgacttcaggtgattcaccacccccccccccccgccgcccccacctcagcctcccaacatgctgggattacaggcccggaccctgaagttcttaatatttactaacttctagtttattgcccaagcaagtaattataggaggtatgtactttctaatattagcattcgtttcttmttyttgttaattcactgtgtgaccttgggcgagtcactttacctctggggagaccaaagattctaaagtaattgaagaaagcactgtaggaagctcctgacagtattatgcctccctactgtcagtcaccccttgacatattccatcattcagattaaaataagagattaccaaaacgctacctatatttgaattttaaaagttaaatttaaaaaattaaaacagggcygggtgcagtggctcacacgtataatcccagcgctttgggaggcttaggcaggaggattccttgaggccaggagttcaagaccatcctggaaaagaccctgtctctacaaaaaaaaaaaaaaaattaaaaatgagctggatatggtggtgtgcacctctggtcttagctactcaggaggctgaagcaggaggatcgcttgaacccagaaactggaggctacggtgagacattattgcactactgcactccagcctgggcaacagaacaagaccctgtctctaaaaaataagatatcaaaatacattataacaccttgctgtacattcacgattactgtgaggtttgttaaaagataaataatatccttggtctcaaactcaccgcttggatcatcagcattttgcaagaatggaggtcagaatcccatcttttaacaaactccacaggtgattctgatgcacaaccagacctgattttcactggtgcctgacagcctcatggatatcctaaggcatctgggtactgaccctgcagttggtggtctttcttcctccttgaacatcctgaaggttgtacagaggaagcaggggatttttttttccttttcactggtggcctctatagtcctacatcttcttaaccttcatcatctacccttgcagccaactttttaatggaatcagctcatctgcattctctgcgcgtctgttcatctggaccctcagcattggcaagttgttggttcttcatcatttgctttgttacaagtttaataaaaaaaggcacgacttaaccataattcacatttttcccaattaaccatagcaagctcctaaattcttaagaacataaaaaatataattacctaggtgataaacagtgtctttttttttttttttttttttttttagataggaagtaatagactttgggtctgtctggatttaatattgacattatagtacaggaatgctaatcactgaagctgtaataaaaataaaaaaatttaaatcctcttttctatacagtattatattctaaatttcaaatgggaaaaggcaatttgaacttccatattttctttctagaagtttttgccattctctaacctattctactatttacccaacttctttcattccaaatacagacattttaaatgtcttcggcttgtagggctcccaggccggggaagaaataatcattcccttctggaattcaagccaactactggaaatcttatcagccatttagtccaatgcatattaaaatttagcaattaattatctctagttctaatccagtaagcctgtacaattaacatcagggattcagttcatctttttgctgactttctaatttaaggattgggacagagtggatctccctagaagatgtatttaataacaattatttcctgtatttaaatcatttttttaacccatggtgcattttgtacaatatttccgtaactttttctagaggggagattgttagcggtaaataactcaaaaaatagaagggaaattttgttactcccttaatttttttgtgttttaaaattgttagaatatcaacatcacctatggcaggaaaaaattttcatatcaacagagaaagtcatttgcgtcatggtgtgatttctcagtgccttgctcttccttcttggccaatctgccttacstgcttgcttgatccttggaattgctttaatattggggctactttttatttcaccattagaggataggtagactacatatttaattagaaatgccaggaagagttcattcttgagctttaattcatactgtcttgtaatgaatgaggggattctttttcagaattgttcatgatgggctgtaaaaaatgaattgtctcattcctaggtaaacagtatctcaaggasgtgagaaaagaggaaagtacataatttatggagaggcaagaaaagwggggctctgaagatgggctttatgatttttattgaaggctgaggatcgagttcaaatggtgatgcccgctatcgagaatacttwgtgccactgttccatgagatggggctccagytttttcatataaaagttacacaccgccttttccaggaagcctttctggctttcaactacaatataattctcatgctttttttgtttatatttctactttacttacattacagcctttgtaccaacatgtgtctctttctccaraagttctcctaatgtcaggaatgtctttgtatctgtctactgcttctttttctttgtcataacmccttagcatagtacactrgtctatasttaacrctaacagatttaatatgtctagggaatgagtgttcatgacatcattggatgttttctaatacacttccaatttattaaagaatatttgaaaaatggagagaaataaagagaagagttaacattaattcaacttctcatctataaccatcattaacatttgagtaaatttccttccagtgctttaaaaaattcctatctaaatgcatatatggataggtctttgtagatttataatatatatgtattatacatgcacataatacctattcgtgtttgtacattttgtgttctacttttttatactttactatgtcaatactttttcattttatgaagtattgaaaacctgatttcttaatgtctttcaagtattcacctttgtgtatcagaatttgttctctcatttagttttttacagttttgttatggttatacataaaactgtgacaaatgttttacaactaatctttgtctgggtctctgatcattacattggcataagttgccagaacgctatgaataaatattttgatatgtaggccaattttcccttatagtgacatatacctgtggcctctgaagacttgaatataaatgaaaatactctgcctatttttccaacaaaattaccgttttattatttaaaatcgtagttaattgaatatagtgaagttgagtattttatcatatggtagttaaccacatatatttcttattctgtgaactactcatgctttaaatttagttttctaataaaggatttgtaccatattgatttgaatagcactctgtctgaagatgttagctcttcgtctttaatacttttttcaatacatattctccctattctttcacttcattttattgataatggctttggggagctgaaagttttaattttctggggcgwtatgtttcattttttcctttgtcattttgttttaagatctttatacttaaaatctattttaatccagataaaagtttcttctgtgtataatatggctcaattttctgctcttattttattaataagyrtgtgattaattttaatatttgacatgagatgagaaaacaatgtaacatattttccttaaatagttagccattgtttgttgaagagctctttcttcctagaatctgccttgccaacttttatcagacagcggcttttcagtatactatgattcctttctggcctctctcttctgtcagttgacctggatacccttgaatcagtacacttccaacaattgctattactcttcatttttaattttaaggaagatttttctttttgaataagtttagcccatcagtgcaagatttcycatgaggctgagacaggtgcattgcttgagcccaagaatttgagaccagcctggcmaagacggtgacacctcatctttagaaaaaatacaaaaattagctggacttggtggcatgaacctgtagtcccagctgctcaggaggctgaggcgggaggatgacttgagtccaggaggtgaagagtgcagtgagctgagattgcaccttcactcaggcctgggaaacagactgagaccttgtctcaaaaaaaaaaaaaaaaaaaaaaaargatttctcytgttcttccttattttaagggccatttctgtgtattagtgtgtacaattaattgcctgtttacaagaaacaatgggagagtctgtcattcagacagagccagggaagagaccagactgtttgaaaacatgatgctattgcttatttgtgtatctgtgtgctcatgatcttaggagttggagatttttaaattctagtcgcagccctgctcctaagtagctatataaacttgatcaagctaattaaccttactgggtcagaatttttaaaataggaatattcatactgtttaccttgtctgattatgaggattaagtaagtaatttacataaaaggttgtgcttgttttataatgtattttttatttttatttttgtttcttaattgtggtaagatacatataacattatatatatatatatatatatatatwtttttttttttttttttttttttgagacggggtcttgttctrttgcccaggctggagtgctgtggcgcgatgtcggctcactgcaagctccgcctcccgggttcacgccattctcctgcctcagccaccccagtagctgggactacaggcgcccgccaccacgcccagctaatttttttgtatttttagtagagacggggtttcaccatgttaaccaggatggtctckatctcctcacctcgtgatccgctcgcctcggcctcccaaagtgctgggataacaggtgtgagccaccgcrcccggcccaatgataaaatttatcattgatcatgtttaagtgtacagttgagaagtgttaagtacattcacattgttgtgcacccgtctccaaaacacttttcatgatactgttttccaatgcagctgtcatcgtagaatcttaatcttcatgtaccagtagtcctcctttgggccaagatttctgatttatgcatcgctaatagtagggtacagtgactggcgcatagtagatgtaacactgaatcccaaaagactaaccagttagtagattcactgtgtatggccacacacacgtygaacagctctctctttctcatccccttttaaataaactgctaagctggcctaactgggaagaacataagcattttattggtaaggtttctgtagtacatggattatagcctattcatttatgcattaaacaatttattgaatgcttggtatgtgtttcatgctgctgtaagtgttggggatacagacrtgaaaaagacaggatccttaccttcacagagcttgcgtcttagtagggaaaggagataaggagcaggcaaataagtaaattggcaagataatttcagagtgcattaagtgccatgaagacttacctattggtaagcagacacagaattcatgggtcaggagaagaggctacttgagattggatggtcaggaaagccctcaatgattagatgttatgtaagcaggcacactatagactacactgtggttgacactcaacagattgtccatctgagccaatcagcccatagcattccatggtcagtggtattcgactgtgagtcagcaaatggcttaaagtggttccataaggagtaaaggaaggccttctatgccatagccaggaaagagatttttttcttctctactgttagaacatatcaaaggctgtggcagccttgattgctgcttgcttccatcatgctcctatgtaaagactcacccaggaagctggtattttcgtatgctctagatgaatttatgtagtttccattctatcctcattcaagttaaagttgttgcaaaactaaaagcatcatttctcagattctcttttagccagcttcaaaaaaagtcttctccaattagatgtgtatatgtgatgtgtggaaggtgaaagcsatgtggaggccatatttcagccctcctttggctgtttctgctggtaaacgtagctgtggcaatgtccaggttccctgcagtcgtgtttttctgcccactctccagctttctgagttttacgaaatggttgggrtggcagaagcagcagtggcagcgctatgatcwggcttctgaaactcgggaccacagctacagataagcattctatggtttcttgcattagtagagtcagttgtaatggtgacaagttcttgattttactatggctccaagacagcttcaggaggagtggctccttacaagttccatgaggtcratgggatattgttctgggagtccttactgaaggctctacctagagttgtrctttcagccctccaagttatttctccarcaccaactttgctgtattaaatctcccctgcttaaaatatstagaatgggttctgattcttgtacttgaacccaactgacacattgatgctttcatgagcaaagagaaataatcccatacttagcttcactgagccacttatcttagtgtgtgagacaataatttctcttatggtttatgcccgttttagttgggattttctacatcttgcaatagtaagcatttaagagatacaaataatagaggcaaaaaagggctaatctggaaagcccttaaggaacggtgtttcaggcaaagagttggatgtttaatttgaggtgtctcttagatgtcaatggggagatgcctgggaggccttggctgtgcaagtctaaaccttaacagaaggctcggtatgtggatacaaagctgaggtaggacaagagctagtctagaggcagagccaagatagggaccacttttttcttacttcttcagtgggtagtttgacagcatttcagcttctttgtaaatcaatagtctgttccttttggacaaaaacactgaattttacagtagcaaaggacagctaattatagagctttaaatgtagtttatttgtgcaaaatggagtataaatgaaaggtatttctcaaatcaccattgaaggaaagatagccccaaagaaatgggtaattacattgctggaagaaactaatctgcatgggttggcatcatttttctagggtgtcagtaggagtctattatatatcagtggttttagagggatctcactaccaacttttgttgttattctttaactgcacctttgggtgaaaagcatatgtttgtcttaccagaggggcatttttaactttacactttgtttttactcattccagatttaagctaggactttatccttagatacaggactgtatccttatatacgggtatatgtgaatttataagtgaatttctctaacactgatctaaattctgaacacagtctwtgtaaaagactagaaaaatcaatatgcggtgacattctttagtagagaaacaacatatactttttttttcttctcggtctatcagattacttttttttcttcttggcctatcagatcactctgtagtgtactcagtattttgtatagttcacctctgacaatatggatgtatgagttacttctgacccacgtcattttggtatctgtatcacaggagactctcctaggctttgggaattgtttcatgggacaggcagagtagagaaacacttagcagagattagatggggtgtgttctgatatatatggaatagaagattttagttacataattgaaacatgaaaaattaaaggcaatyataaagtcctaaagtgggaagaaatcttgagtggtttttatgtcaaaccccttccttaactgggtaatgatgaccaggtctcaaccttaatggtaattgaattaaatcaatgaataactgaaataaccattatatgtaacacttggtgcttattttagataatctatttcaaacacctctatgaagtcatgttagtatgtctgttttacagattaagaaactgaggctcggaggtgatgtaacttatccaagaatgcacagctaccaaagatggaaacagaatttgaacttacgtaaacttggctctgaatcacacctgttttacatcactaagccataaactggtgtctatttggtgatctttggattcattagggtgagaagactctcttaccctgctttaatcactccttagaatcattttgtcctgatcagaaagtataaatgttgcgaggaatgtggtgattacttagttcatctttgtgctccatggaagaaattttcaagatggtgaaatgagttgagagattgtgacttattctgagcccacttaccctgcttagagatttatactgaatgttagtatattacatgatatgaaatgtcctgatgcttaacccaaaaattccaaattattttggaggcaaacttttattatcattctatggaggtagcccaaccccccgtgtcctcatatgagaggacgctgrgaatagagtgatgaagaagattgtccctggaacacaggtttcctgtttcctttatagcsataacattgggctaatttaggcctaactgagtgcgtgaatcatggagtatttctgatcgaggtctcgaaaagaaaactcctttaccttccaagtagttttttgagaagcaagtatcaaagcactcagctgaaaaatgcaagtttggattattattaacttatttaaagaaaagtgatttggggaagtacragaaatacatcattggtttaattttggctgctactgtgggtcagtagccaactaagaggagaaactgggctgtaaagaagaacttcacctgcagaaaggtcagatttatgcaraaagccagcaggcaaagctaagaacatgtcttccaggggcctcaagttccattttcaccttttcttcttggtaagtctcagtactataggatacttaggtacacataagccattttctgccgcatttaaggaaaccattaaccacttgcttctgttattctcttcatgtatattcagcccctttctctgttctgctttgctggacctgttgggatttggaggcctttggaacataaaccctaagggttgtgattcttctcattatttggcccaagaaatatctctatttactctctstttaggaataagccagacatggaatttttttttccgttccctaagactcacttatagagtaaaagtgggaaatatttcacttttgggattgtgttttatggagtttaataccctctgagatgcrtgagatgacatgaaaagttcaaacacaaactctgctgataaattccttgtgtgaatgacattaactgaagagctaatatttcttactgggcttttatgctgaagttagaaaatcaggcccattttaatatatgagatgggggagaaaaaacttcctggctgaaacagcattttcattttatcactgtaatctstctctctccctgcccctacccccgtccccctcttttacagcatctagagcagaattaactgtttgtgaggctcttttagttaggaagctcccagttagcaatgcagaaaccagctctggttatctggtgtgaaaaagaaaattaccagattaacaatgagaactcaaatcttagaaaagagaaggaatggctgggcatggtggctcacgcctgtaatcctggcactttgggaggttgaagtgggcagatcacttgaggtcgggagtacgagaccagcctgaccaacatggagaaaccccgtctctactacaaatgtaaaattagctgggcttggtggcgcacacctgtgatcccagctactggggaggctgaggtaggagaatcacttgaacccaggaggtggaggttgtggtgagctgaggtsaagccattggactcctgcctggacgacaaaagcgagactctgtctcaaaaaaaaaaaaaaagagaagtaactgggacaggattaaaggccaagaaatgctaagcacaaggtataattttagcatgatctgtcgagctaggagtcccctgtccttcaggctctggcaagagggagggctctggtcagtagcaggagctggtcatttcccatccaaaagagtttacacagtaagaattcaggcataggtgggacacaggggtgggtactagataggcatgaaataaaaacaaaatgaatacacagaaaaactggacaatgaacccctggagggagtgacattacctaaccttttgacttaaatggctgagaaccaacttttgagctagcttgaatttagttgtaatcaaagctctcaatagttgyttctgcaagtacagaatattaaactgtgtctaaacctcccatctgtctagtcaattcagaggaactcccccatacaacccaagtaaaaacataatgccttatgatggaaataaccccgaagtggacacattgaattagcttttaacttaactgacatgacacatacggtcaaagtcaagcaaagcactttccggacccataaaactgtattggattaagttgaccaatctgtcaaagtaaccaaactaacatatrtgtgaagatgaaaccttgaagaaaagtttaaagaggttttgtccactctgaatgtcctttcacagcaaccccagagtagtatttgtttctttgtttcaaattaaatgattaaatctggtcaaacagataatgcctcaaggaagcaaatttagactgtcaacactattctttcctgtatttataaaaggttgtattgataaaatatctgcatatctgctgcctgtttttaatattcttatggatagtgttaaagtaaattaaaatggagactaggcctgaaagaaacagatgatatcagacctcataagtgacctaaaccttgcttggcttgcaaagcttaagtgaaacttaagctattccttgcaaatgcctatattaaaggaaaacagaacttaagcctgtccagttggaartagccaacaaacttatgtatatatatttagtgactttctaatgggatagagcaaataaggcaattatagagctataaccagtcacatactgacttgctttacttttgtgaccttcctataaaagtccacccatcatgttccctctgtggagctcgtgaatgacttccagttagaagctgcccaatgcatgaattgttgttcgatcaaataaactctttaaaattttatcctgcctcagtttgtgttttaacagtaggttattctgataagattagaatatgaattgtatatctgtattttaattttttttagttttgtttcccctagattgctcatcagaatgtatttttatgtgtaagaaaagctatctgtaacaggatagtttactgcraagttttatctatgcacatgtgctctggatgtgtaagttgatccaaccatcacaaaagagtcctttgtgtacaaaaaaaaaaaaaaaaaaaaagaattaaagcttttaaaggttaaaatttatttaatcaaatgagccttttcctaggaaaatagtgcccagattggttgtcaaatgcatrtaaaattcagctttttaaaactgattaattcacctattataaaaccaccgtgaactatcactgatcttttcttaattatatayagacaatgggaaggcttacaataaaaaagtttcgtttccttaaagagcagttttcacaaggaagtttcacatttctaagggatgccaaattaaaaaggataaaatacacttttgtttaaggtatccatacagaggaactgtatgattggagctggattctatcctcaaggttcttcagagcccagatactggacgtttcctgccgtccatcaatattgtggcttttggattcactcctgaaagggagagaccaatgggcgtacactacatgcaccctttgggaagatagaaaggataggggagtctcatctcttctgggaagcagcactgtccttggctgggcacctcagattttgtttgatatacaacagtacccccttatccacaggggatacaatcaaagacccccagtgggtgcctgaaatcacagatggtaccraacctaattgccatcagtaggaacgaacacatttctgttcatgtcttcctttcacagatttaatgccttttccatcttaattaagcacttatcatgaactgtggttgaaacttttgcggtttgaggtgtgagagcaaaactagcatgaatttttctttttttcccaatttcatggatagaagatttattcttcctatagrtgttgccacccttagcatatgacttctctttactaaatcaggaacttttgacttttcacttaaaagagatactttgggacttttccttggcatatccaaatttacagcatcactactcttctgtggggctatygttaagtaagagaagagttacttaaacataagcactgccataccacaacagttgatctggtaacagagatagctactaagtatctaacaggtgagtggcatatacagccagaatatgctggacaaaggaaagattcccgctccagaagagacagagtgagagacaatgagatttcatcacactactcagaactgcttgcagttgaaaacttatgaattgtttatttctgggattttccatttaatatttttggaccatggttaaccaagggtaactgaaagcactgaatgggaaactgcagatcaggagggactactgtagaattcttttctctgaaaattcatctctcattactaattttcctgcccattttctttttcttcttttaatgtaattttgaaagtttttagagtaaaagtaaaatacttcatgatgggctttcaactaaaaaaaaatccacactttttataaatttggagtcggaaatttgggtgtgaaagctgctacatctcacatttctgtcttgctaacatatttaattatacatggcagagcaaaggaagttagttcagggtaaagctaattaagagaagtttctttataggtaccattagctgagtagtgacacacagctttggtgttgcaatattcttatatgtttcaccctgatcactaamgtaggcataaaaggttgaatgaggtcttgtcctcttacattttaaatgtaattcctagaaaagtagagaagccacacatatctcagtctcaagaaataaargtgtttctctgtgatttactaaacattctgttctttgttggcatagagcacaaaaactgtattatatgcaaaattatcgagagattttgtgtgtgagtacatgcatgcatttatttctaagtcctgtagagtaacaatgaaatcttactrtctctgaaataaagttgagatgcattttaaagtagggcaggcagcctatactcagaaccagtgagtgcctggtacttgaaagaaacaaagtccttgttaagtgaagccgtatcctggagagttttgtatccaaacaataacctcaacattggttggttcaggggaaatagaatgagtgatcttaattaaaaattgcaatgctctacagtacaagtgtgaacggtacagagcagtcacccagccaaaggttgaagcacacaaattatgcttaattgagctccattattgttgagtttttattttattttaaartatactaaagrcagtaagagcttcaagagaggatattaaacaaccatcattgatcttgaatttagctggtggaatttgaaagaaacactgccctcctttctgaagaggaggacctctgttcccatagtaactaagtttcctggattcttggtgactgaagtgactaaatttgaactcaactttggcgaggtagcattgttctggtttttattatggatttttaaaaattctaaattttatctgtcttaaagagaagtctaaaaaactttcagtttctctttctgatctcacattctctaaggccattaattgaattttgctttgtttcattgttattttcatctgaagttctcatctgtaatcttttggtgattgttcttctagtatcactattcactgcattgcaattctaaaagataaaaacctctccccctctttctctttctattctataagcccactgattgttgtaaaaaaaaaaaaaaagtttaattcactctctcttcaagacttttacattgtgtgttcaagtcagctttttgctattctgaatataaagtcacttatagttgtttggartgatttgggtcatttcaaagataattacaatcaaagcactgaatgcacacattgaacacaaaatagaattctytataccaagcaggttctagcacagagttggtatttaatgaacactggttgattgatgatgtgttgacaaggaggtgattttcttatggctacgtgaccactcaggggtaacaactaaaggaaaasttatctttgatgctacattgtttaatttatagtatactggtttgataggactttttttcctccccaaaatgagttctgagtttttgcctgtggcatggtttaaaaagagtctaccttcctcactcttctcaaaatcctggcctcatgtaggggtcacagacttaaatttgaaacagaaatatgagcccatatctgataggagcataggaattacttcctttctgcttcagaagtgtctataaggagggaaagcagataagctttctaactcagaaagtgatcwgctttttagaagtggcaatattatgcacaagcgacatgtagttaaaattggttggaacttaatrtccaagtaaagcacaaaggaaaacatattcctgaagcagtgaaggacatgccatcccagaatatgcgaattggtatgttgattatttcgagctgaaaacgttggaaaaagtataattgcagagggctaactgaccagtctttttctacacgtagcaagccataaagattcttttgggagggctgccttctccgtacaagggtaagagaatattccttatcagtggagactgtgattaggtgctgcaatgtgtctgarcaaataaacttcctgaaataatccttaycttctacttgttttacattcatatagctcctggtcactcccatagaaattattttccctagccagatccctttttatcctgtcatttcttcacaaatttatcgtggtgtttgtttgtttttgtctaaaacgtgtaaaagcatgttgctttggtcacttctttgaacttcactgtcttgtgaagattcccatgtatgtgtaaaattaataaaatgtgtacgcctttctttgttaatctgtgttgtgtcaatttggttcctagatcgggccaaagagcccacataagaactaaggaggggaataggggtgatcgttttctcccctacaatatacaatgtgtttatcaagtaaaaacaagtctgtcaagtctagaaacacagctgtctcctttcctgtggtagggggtaaaactgagagagagctgcccagagaggagaacgtgcaaagaccaaggagctgggtcaagcagtaagctgtgatgtgttagcttttattaaaaagaagcaatggggtcttaagcttcataatttctatactacaggggtaaataatattcattgtcacatgtgctcagaaagaaaaagtctaggaattatttgactttccacaactcccccatatggcaccttcgcaaatgcatggcatgtatgactggttaaatgcaccaaatctataattgtgattttatcagacacgggacttgtgtggtttgatatgtagatgtgtcatttttttctcttttattttgaaaattatcctgcacattctctttatgttattctcccttgaatcctgtaatgatgtwagtgacaatggtctttatgagcctaggaattaaaaagatatgaagctttgcttggggagtgttattgacatgggtgaccttgattgttaagcagtgctttattacacataaaggtgaagggttttttttttttattcttatttaacactaattttccaaaatagccaactatggatttacagatgcttactttgtgccttcttggggagatggtgattgtgactggacatgctgaggaatgtggaggctgtcttagaaccataagtaagaacccccwgatcattctggactaaatgtttccaaagtgatagaagtgaaagcagaaagtgctggcttactcgccccatgttgcatttctcgttgcttccatgtctcacctgaactttgtctttgttcctttcacacaccctcaaaactttaygcttctgcactaactggacttctgtgcaatgcagctgtagttattatatttaagcaggctttgctgctgccaacattggcggccctcagcctcaatctatactgagcgtagtgattgagatgttgttagttctcaggaagttataatttagttaaactcactcatttgcctaacacttattgaacacctattgtgtgccaggtattgtaktgaagataaaggtacgatttagccatgatttctatacttctgggactcacccaccaaaaggcagcttttctgacagattgttgccacattyaactttgccttggtgcattcaaaaattctttygaaatcctagaggaagtaacaattaaactgatccttgagcagaattagacttgagtgaggaagggaagaaagacatcctagcgagaggcaacagctggtataaaatttcagaggcaagaaaaagtgacctattcctgaaggaagtggctcagtgtgccttgcgtaattgtccatgtgggagagcgctggttgataaggctggaaaggatggcaggggcccaggtaatgacagaccttggaatgtgatggaacttggcattcgttaatttattcattscacagatactgtttacatccatgtgatgtgttgcaggttaatagggggtacaatgccaaagaagataaacaagggctgtgccctcatggaattacattccaatagggaaaattgaagataagtaagtcaatacgtaaagacaatcattgcagtttgtgtaaaaaggagcaggaagaaaaaaatacgtaatgtaatagaaaatagcatggggtgggtgagggaaggcagagacctttgtagaaagcataggtagagaggactttctgaaggtgacacttagctgaaacttaacggatgagcaagagccagtcctggggagctgaaagaagagagctccaggtcaaaggagcagcaagtgctcaggtgtgagaggaagccartgagcccagggtgcaggaggtgtgagggagagtggcccgaggtggacatggccatctgtacagtgccacatcacattatgcagggccttgcaggccaggtaatgtgcttggttattctccatgcattgaaaagtcattgaagcacagggtcagggttccctgctttacatttgtgtcaagcccttctggcggctgtatacagaaaggattagaatagggagcgggggccggcaggtcagttaagagcagatactgccctgttccccaggtaagaagcaatggtggtctggcctagggggtagactttgagacagaaagaagtgtacatattcagactctatttcagaaatagagtcaacaagaattagagctgttacatgttcctggcctgtgaaaacaggaccttagccatacatggcttatatataactacttttttgtccaaaggtcaagtggttcttggtgtcacacatgcagtaacaagagaacaaaattaaatgaaacaaggagatgttggtctctgttttaattttgtctgattgacatagatgatggtgtgtctccagcatgactctactgtttagctttagggattagaaaagaagtcatgatttaaccatatgtaatagaaataaattcactctggttttaagctaaactttgtcctcgagccccttctaccccatgacagagcaatcccagtgatttgtggtgtttttgatacaagaccagagaggggtttctggaatgatgggactggaaccactcggggtcagcgtagtgagggacaaaggctcctctgcctatgcctgcaggtggaaacaacttaggatttttaaaaaccagttttttaaaatgacacaattctggacttggccaagagtcaaagcaagtgattttgtttgtaccatgacaccagtgaagaattyaatggtttcaaaaaatcacaatttttttttttgaggcagagtcttgctctgttgcccaggatggagtacagtggcacaatctcagctcagtgcaacctccacctcccgggttcaagcgattctcttgtctcagcctcccgagtagctgggactacaggcgtccaccaccatgcctggctaattttttatttttagtagagacggggttttaccatattgacgggggtcaggctggtctcgaactcctgacctcaggtgatccaaacaacttggttggagaagatagcttttcagtcctatattgagactggtgagaacagactgtccagttgacctgattgtcagggtcagggcagcactcacagtgaagaaagggggttccagtgtgctactgtgaaaaactgtgactgttgttcctgataattgtttgaacagaattcaacacacaccacaaccatttacggagcacttctactgtgtgaagcatgaaagatgttcattcacgaaaaatactttaatatctgctgcagctcagacagtctgattgtgggtaaatcagccagagtttccgctttcatgaagcttacccagtatacatgctctatgacatatgatggagctgtgtcccaataaacttatcatgagttaaaatgcatttaatactcccagtaaaccattaaaaagtcaaaaaaatttgagatgaaccattgaagttagggaccatctgtatttggtgagatgaaaaaagtatgtaaatatgtcgggtgaggccagtgagataacttccagagtaaggagggcttacacctcattgggggcattcagaaagggatctggggagaaacagttacattataaaatgccagggtcacagtgttagaaggaccattagaggcatagagggtacaggttaacagcccagctctaaagtcctactgattgggtcagaatcccagctgagtgaccttggaaatgttctttgaccctcctgggcctcatctatgaaatgaggattattatagctccctcttaggtaattatgagaataatgtattccacatgcttagcacagttcctgacaccaaattagccattattatttttatcgtttgagcccatcccattccatttgtgaatcatttcagatgttaaaaattcttggttggtagayggataagttatcaagaggtaaacagagcaaagggagagcctttgagktaggaagactggcatgagcaragactagtaggagacaagtatggggtatgttcaggcaacagcgcatgattactctttggctggagtgttgggttttaggcacagtgggagatggggtgaagaggcagaggcagttatactggagaggctttgagagccagtggtcaacagtcaaatctaagcactctactatatcattggcctatcctttccatattagaagttaggacaagtgtaagatcaggtaaacattggtgagctaacagaatacaactgacccttgaacatcacaggggttaggggtgctgactcccaggcagtcaaaagtctacatataacttttgactctcccaaaatttgactactgtttaccagaagycttactgataacacaatcagttaacacattttgtatgttgtatgtattatatactgttttcttacaataaagtttgctagagaaaagaaaatattagtaagaactaaagagcttctgcacagcaaaagaaactaccatcagagtgaacaggcaacctacaaaatgggagaaaatttttgcaatctattcatctgacaaagggctaatatccagaatctgcaatgaactcaaacaaatttacaagaaaaaaacaaacaaccccatcaaaaagtgggcaaaggatatgaacagacatttctcaaaagaagacatttatgcagccaaaaaacacatgaaaaaatgctcatcatcactggccatcagagaaatgcaaatcaaaaccacaatgagataccatgtcacaccagttagaatggcagtcattaaaaagtcaggaaacaacaggtgctggagaggatgtggagaaataggaacacttttacactgttggtgggactgtaaactagttcaaccattgtggaagtcagtgtggcgattcctcagggatctagaactagaaataccatttgacccagccatcccattactgggtatatacccaaaggattataaatcatgctgctataaagacacatgcacacgtatgtttattgcggcactattcacaatagcaaagacttggaaccaacccaaatgtccaacaaggatagactggattaagaaaacgtggcacatatacaccatggaatactatgcagccataaaaaataatcagttcatgtcctttgcagggacatggatgaaactggaaaccatcattctcagcaaactatggcaaggacaaaaaaaccaaacactgcatgttctcactcataggtgggaattgaacaatgagaacacatggacacaggaaggggaacatcacacaccggggcctgttgtggggtggggggcggggggagggatagcattaggagatatacctaatgctaaatgatgagttaatgggtgcagcacaccaacatggcacatgtatacatatgtaacaaacctgcacrttgtgcacatgtaccctaaaacttaaagtataataataataaaatttwaaaaaaaagaaaaaattaattggtagaattaagaaaagattaaaaaaagaaaatcagaaagaggaattataattactattaagtggaaatggatcattgtaaagacttttcatccttatcgtcttcacattaagtaggctgtaaargaggaggaagaggaggggttggtcttgctgtctcagaggttgtgaaggtgaaagaaaatccatgtataagtgggctcacacagttcaaactcatgttgttcaaggtagacctgttttccctggagtctgtcttggaaaactgggactagatagctcccaaatgaacacagtatacctcaggggcagtgtgtcctctttgtagcactaccctgggctcctagggaaattcccagctcattttatttagacccatcatggtcaaggggtaaagctcccccttcctactattccatttaagctcctcatcttctgtttggaggggctggtagatttcccagaccataagatgttcarttacctgtaggggataaattgccagtccaagttgggtgtaataactggactaaartttgggggtgctggccaatgggtgtccttacttgatatttgggtatgttttcacctggccacctggtactctacatggagaccctaattctttaaggactcgagttcttctattcctttttttttttttttttttaataataacagagatagggtctcactgtgttggccaggttggccttgaactcctagcctgaaggaatcctcctgccccagtctcccaaggtgctaggattataggcacaagccactgtgcctggccgtttcyattccttttataccctaaagtcattccctcttgcatcctcctgccccttccccagcctgagcttttcctactctctggttcctaaaaccatttcctctgtaaacattccatgacactctctgctctgtatttagccagcagtttgtttttctttgtccatgcgtctgcctcagcttgaactggggagaaggaaaggaaacacacagaacaaaacagaaatctgccaatggaatgtttgtgagaaaggaaggtacagggaaaacaaactgatgaacagatgactctgaggacagtaggaggcagccaaatacctagtcagatagaggtgagtccccagtgaaatcccacctccgaaccaacagaaacagcctgaaggctgaaagaccagactgctggtcctggatgaaacctgcgacccagagtgagaacttgcgtttctgtttgcctgacctttcttggttgattctttctgaataatgccgttgaaccaatctaatgttgctttttcgagtactacctactgcctgcccctcccctattctgagcctataaaagccccagactcagacaaattgggtggactttcctgccttcagatagggggaccacccctgcatccccactctgctgaaagctgttttcatcactcaataaaactccctgactttttctttgattgtcagtgtatcctcattctgctggggcgcaggacaagaacttgggaactagtgtgcaagtcagactcggcctgagcgggctaagtgggcgggccatctcctatagcaagtagcatggccgagtgaggcctgggcagggtgtcactggccagaggtccctggcttgcaaagtgatcaagaaaaaatcctgtgtcaactccttcaaggtgtatatgttatttctggtctttttatgattcccttcttctcaaagccagccacmtggggaggtgacgtggaagaatatacacagcccaggatgggaaacaggagctctgggatgtaagcctggctgtggtggtggctcagtaatattctggaccaagtcaataaacttttgctggattcagtttactgtcttttaaacaaggtggttgtaccagataggccaactagaatggtccttttacagaacgaacaggctgttgttttgccttttctcagcctgtgagagatctgatttatgtttgattctttaacttacaatgaggccgattatctagaaaaacatctgtattgaaatagctgagaaccggattcagtcccttcaccctcagctttccctctacatgcttggtcgtcttgtgaacaaatagcctttctcctgagcaagactcacatgtgatattgcagtttttaaatcaaatcagaaagaatatgcttcaaaaataatttcttaaggatttattcactgtttgcttagtgcaggggttatatttagtcgcattttaagctctccaattttctctgaaatgtacacgggagggaaatgagagaagcaattgaaaaacaataraaaaagcacttagaataaatagagaaggtttggtaaaaccttccaatgtgtgggaacgatttcaagactttctacagatctttaaacattccacctgtttcatttgggtgttaaatggaatgtatgcactgctttcaaagctatctagaatcctagaagttttgcctccgaggtaataaatgtacaaaatgcatcgttgtgcctcttggctatcaacacrccctgcttcagacctttttgagataagtctttatctcagctttttacttcctgcttcataattgcccagctaagctaatgaagcccatttggtgttgtgagcattcaaagcgttcatttgcatgaaagctaccaccccttaattatgtaaaacagatattaaaaaataattccctgcttctgatcatgatcaagactctagggatgaatcctaaaattcaagtccgttcagagttgtccttttatgctcataatcatttgctaaacttaaaacgcttgggtgcttccttttgcagtgttgtctttttttttctctccctctctccttctctctctctcttcttctctctctctctctcccccaccccttgtgttcccttcccttccctccctcacctgcaaatggtggcacagtgccagcagcacccagctaccactctgtttgctgggtgacatgaatcctgcaagttaggaatcaaggtgtaggggaaaatgatgtggctttggcatcacttccctttcacaggtgtcttattacattttgacaggtgtctgacaggagatgctgtcagagctaggatttaaccttggaatgccaccttcaattaggttgtctcagaataggaaacagtgaaatggatctgagtggttgatgcctcagtattgttctatttaatttcatttctgtatcagatgtattgcctatgtgggcattttttttttccaggtgatacaaaaataggtgccggttgggccctgtcactaaaactgtgagtttcataagctgttcttgttgaggagtcagatgaagcagacctgtcatcccaaaatatattcagtggaaggcagatctggtattgtttagatgccttcacacttaatggggttttaatttctcataagtgtctaaactgctaacagcaatgaaatgcattagatatcatttgtcaaatataaaaaaatgtaacaaaatgaatgattgagaacttgagatggggaaaagtctgttagtgggtagattctcttagaaacttcactgggtaacactgtctctctgttttttaatcttcaatatttttttttaaattttggttttctggaattctgggggctctgagagcacatatagtcagctctgcctagcaaaataagataggattctcrcaccttacacatacacagtttttcacaaatgagaggcactcacttgtatttgtggtagctggacctgaacagatttttaagtaaatttgaaacattgatgcctgtagtaggcaatatagaacagcagtccccaacctttaggacaccagggaccttgtttcatggaagacaattttcccacagacccggtggtggagggagtggtttcgggatgaaactgttccaccctatatcattaggcattaaattctcataaggagccygcattctaaatccttcgcatgtgcagttcatagtagggttcttgctcctgtgagaaatgaatgctgctgctgatctgataggaagctaacctcaggcagtaatgcttgctcacccgccactcacctcctgctgtgtggcackgcggttggggatccctggatagaatacccccctcctaccaaagacctccatgtcgtaatccccagaaactgtggctgtgttaccttatatgcagtggggaatyaaggttgcagatggaattgaggttgctcaatagctgatgttaaaataggaagattatcctagactgtccaggtgggctcagtgtaatctcaaggattcttagaagtggaggtgggaggcagaaaagcaggtcagagtgatgtgatgtgagatggtttcgtcccattattgctgactttaaagatgaaggaagaggccacgagccaaggaatgtagttggactctagaaactggaaaagaagcctctggaaaggaagtcacctctgcgcacaacttgattttagacctgcgtcaggctcaaggtgtcagctctgcccacacctggagacctgtgtcagacccccaacttccagaagagcaagataagaaagtggtgtggtttgaagccactaagtttgtgttaatctgttactgcagccataggaaactgatgcgttgccttgtaagtgaggcagtggttacctaattttcctgtcgaagttcatggtgtttgagcatgaagtggaatttttcttccatttggaattttttcttctctgtgacagagatgtctttggcaccaagctggttccagcttgaaatatgtttagtttgaacagatgcacaatctattttctcttttctgctccctgagattacatgaggaagttcattataatcagctattaagacccttagcactgatatttttgatttgcttacagagttcttttgctcacagtgaatgtcattattgktattatttttattattgtgctgttccagctagctcagatatcttggcccctcttgctggagctgggatgagtttaccagtgtttcactctcctttccatttcttccattcattaatcctctcttgctggcctcctagtgacttgttcttaccatacttacccttggtctgagatatatgtgtgaaataaaagcacctctgaatggaatcaatctagaaatgctatcatgtttcacatactttttagttaaaagccagaccttaatgtagacattgtaaaagcatgattttgaaaatctcttacattacctctaaagtactatgtagataaaatgttgcttcgtacttctaccatggccagcctgtccttgcaacagatcattatttcttaggttgagaaccagatgaagaagttgacttgtgttctgaggccatgtcatacaaagactgtagatctttatgtaatcaaaactcacatggtaccaagcagatataaccaaatcaatataaaccagttacaattatgaaacaagtacactgtataatcatttattctttcattcattttcattcatttaacagatgtgtgttcagtatctgcaacatactggcatagcttctgagaggggttactgttacttgattgcagatgtatctagagattattgtcgtactattccttaaaatgcctttatttgtcttctacgactcaccagtagtggagcctgtgggtagcagccaaccagggggagactcctgacttaattagcaggttggaggtactatggtgtatttgtctgttctcacattgctgtaaagaaatatctgagactgggtaatttataaagaaaagaggtttaattggctcacagttctgtatgccatacaggaagcatagcagcttcggcttctagggaggtctcagcaagcttccagtcatggcaaagggaaagggggagtgaggcatctcatgtggtgggagcaggagaagaaaggcaaggtgggaggtgccgcacacttttaaacagccagatctcatggtaacttactatcatgagaacagcaccaaggggatggtgcgaaaccattcgtgagaaaccgcccccatgatcaaatcacctctcaccgtgccccacttccaacattaaggattacaatcccacgtgaaatttgggcagggacacagattcaaaccatatcatacagtaaacccaccaaayatsccagtctcttctttataagagtggctccagagaagaatgttctgtgccagatcacatggatgacactctcttccttcctcaactccttgtcactccaggtgccaacaagtggcagccatctgttctctagccagcaagttctagaacctgaacagcgacatttcgcttacaactctagaaagtcttttactttcttgtcaataaaccaaagacccttsctctttataaatcttcttcaaagcatttttcttccttcagataacaaactgatatgtccttgcctggatgggctttaggagagttcagaaagagtgagctcttaagaataaaactgttcacctgcctgataatccctgcttcttaaggtttttgagtgtcaactctgtttcagttgaattacttgtagttgcaaaaatccccttacaaagtaagctactgtagagcagtgccttttccaaggagacgactgtctgcttctgcatcagtgagctgaggtcaagaggctaatgatctcctagttgtcagtctgaacattgtggttaatcggtcattatggatgagtatgatgagaaactgttttgaaatcatattcagtgtttcttacctgcttcaacttgctttgctccttgacttccttcacttccaccttgcggaccttaccccgaccccagagctcagacaacagatcttctttcacaggtgcacaggccctttgcttctaagaagtagtaacacttgtctccttagatgtatgtttcacccaaagtctgtgtggcctgactggtggcaggtacactctgaaccaagcatcaaagcagcccatcaaagacactcatgtcagttctcaactattcaagaccccagcatgtcactctagtggtagatagcagagaaagggttgtcaccttcacttcgttggtcattctaagaggctcccttcccttcaattacttgtgggtgtcagaagaagaaagagaacacaggagatatattatatgttgtggcacttcaaaggtgattactttttctacccatcaatcacgtaaagaaaatgctcccagctcacttgataatcctattttgcttttgaagaagggagactgactttctaccaaacaggccactgaattagtactgtcattaccgacttttgaactcattagggcttatttagtattcccaagctgtagaatggtctgaaaagtaatttctccagtgatgggtatgaagagaggaatgacagttttgcaggaaacaaattgtgaattgatccttcacattttcatactgggaaaccatgcagtctctttggttgggcacttagtgagaggttaagtttacttctggaattaattgtagcattgtcatgtagaccattgatgtacktggggtggggggcagatgggagagatgatcagattcccattttgatagatgcagtcttggctccagatcaagaaggaacactcacttttttgtattaggaattaagaattcatatatgtaaagcatttagatcaatgcctggaacacagtaagcactacataagtgatggctgttgttattgttgttgttccattcattttaattcatatatattcgttattctgtcatctctaagtgggttctatggtttgaatatttgtgtctcctccaaattgcatgttaaaacttaatccccaattcaacaatattacgagatgttgccattgggaggtgatcacttgtttcctccgaaggagctgccaacaagttaccattttggaagcagaagactaccctcaccagaaacaagatgctaggaccttgatcttggatttcccagatctgtgagaaataattttctgttctttataaatcacccattgtcaggtattttgttagagcagcgctaatggtgtaagacagtgggtaagcctttcatccagcctataatggaatgggattatttttgttgctgttgaacttgtgttattatttaggttcmtaacccagaagcttgtatgggtgactagctggcctctttccgtccatttatccactcaaccatccatccatcatactrtatgcatatttattcatccaacatttgttgagcttcatctactctgtgctgtgtagtggatgtacaacaatggacagggaatcatggttccttcccccacagaactcatagtttattgaggataccaccaacaacaaaaaaaacccaaaaatatactaaaaagtttaataaagttagagtaagctgtggtaagtgctctaaagaaaataaatgtgtcatgaagtcaacaaatattaatcacttgtgtttgttaagacctctgattataggtcttcataagaagtgygcttggagtgttccctccacatccaaaatcatctcctgtggaaccgtgtggaattatgcagctagctgtcaaacattccccaccaaacaagagactatgtctcataaatgatgatttctgcccttgccattagcgttggggtcctccatttctktaagccccagcttccttttaacatcaagggctagattttggcaaactgaattggcctaaaagcatatacccttgaaattgttgccttacatagtctttcctaaccaagtctgggtattttttcatttaataaatatttattgagtacctaccatgtgtcaggcacttttctaggttctgggcataaaaaagcaaatggtatgcctagtactaattacctgccaagtttcttatccaattaattatgtttgttggacatatgcagcaaatgctaaactttgtttttctataactttggaagatgaattgtctttagaaagtaaataagaaggaattgagtagtgctagatctataaagtagggttgagcctaataactcccataagagagatccaagtacagtgtttatttatgcaaaaaaaggaatgttctcctctgattgtggaaactgaggagaccttgctgaagaagtcaggactcaagatgaatcatgaattagagttggggtttccatgacatgatgatgtaggatgatactcgggcatagggaatagcactttatgcatgaaggtacaggtttcttggaaagaagtaagcagcatggccgtgcaactagttagtgagaacagggaactagaatagaggtctcctgactaacatttaaatactctttccactctaccatgtggtgtttctaaggatcatgcttgatttgtttgtccctgtcaaggcacatgttgaaatttgatccccagtattggaggtggggcctggtgggaggtgttcggatcatgaaggcagatccgtcatgaatagattaatgcctgcctttgggggatgagttctccatctgttaattcccaagggaactaattgttgaaaagagactagcaccttgttgacatcttgcttcctctctgtcatgtgatctctccatacataagctcataagctccctttcatcttccaccatgagtgtaagcagccaggggccctcagcagatgcagatattcaatcttgaattttttagccattagaattgtgatccacataaatccttttatttataaattacacagcctcagtgacacctttgtagygatacaaaatgaactaagacagaaaattagtacccagtggttgggggtaatgggcagcagttggaagagtttggaggtctcagaagaagaaaaaaagacaagggaaagtgttgaacttcttagagaatggctaagtggttgtgaccaaaatgctgatagaaatatagactgtaaaatccatgctgacaaggtctcagatgaaaatgaaaaacttactgggaactgtcacccttgttacatagtagcaaataacttggctgcatcgtgtccatgtcctagggctttgtggaaggtcraacttaaaagtgatgagggtggggtatctggtggatgaaaatgctaggctgcaaagacctcagttagtggcatggctacttttaacaggttatgctgaattaaagcagcaaaggaaagatctaaaggtgtaatttataattaaaagcgaagcagagtgtaaaagtttggaaaatttgcagcctggccatttggtgggaaaggraacattttcagaagaggaatccaatgctattgcccagtccagtgaaattgctaaagagattagcatgattaaaatggagccaggtgctagtagtcaagccaatgggaaaaaggcccttaaggcatttcaaagatcttcacaaccacccctcctatcataggcccagaggtgtagatggacagaatggttcaggtgacaggcctaaagtattgctgccctgggctgcctctggatgttgctccctgcatcccagctgctctggctccagccatggctcaaatggccccagatatagctcaggctccttctctggagggtgcaagccatgagccttgtcagtttttgcatgacgttacgtctgcaggcacccagaatgcaagggtggtggaggcttgatgactcatagatttcagaggattttagagatgactcatagatctctgaaagcatagacagagaccttccacagaggtgcagccaccacagaatctctatcagggttcctagtggagctatggaagtggagctaccaaagggactcccaaattatacagccaccagcagcagcagcagtgtgtaacctcaacctggaaaagccacaggcattcaactccaaccaaggaaagcagctacttgagctgcacccactgaagttataggggcagagctgcctgaggcattaggagcccaccccttgcagtacytaggatgtagggcatggaggcaaagaagattattttgtagctttaagatatcatgtctgcccggctaagtttcagacttgcacagggcctgttttctctttcttttggccaatttctcccttttggaatgggactgtttacccagtgcccatgaaaccattgtatgttgaaaacaaacatcttatttttgatcctataggctcatagctggaaagaaattaccttgggtcacagatgagactttggactttaaacttttgagttgattttgaaatgagttaagacttttgggactattgagatgaaacaattgtatttcacatgtgagaagtacatgggttttgggaatccaggagtggaatgctatggtttggatgtttgtcttctcaaaaccacatgttgaaacttgatccccaatgatgggaggtggggcctgggggaggtgtttgggtcaggagggcagatccttcatgaatagatcgatgcctgtcctttgggttaagcaagttctcactctattagtttccagaagagatggttgttaaaaagagcctggcatccccccacccttttactctctctcttgcttcctctctcaccatgtgatttgtgcatacaatggcttccatttgccttctgccatgagatgatgaagaagcctgaggccctcaccagatgcagatacccaatcttgaactttccagccatcagaatcatgagccaaataaacctcttttctttataaattataccacctcaggtatttcttcacaaaaacaaaaaatggactaagactgatcatatscctaattgcaaaatctcacaggaggagccaccttaaatgacactgactgtgtgtgagggactttccaaagagtttgtcacttatcctgccagcagcactgtagagccaacagaattgcctgtatacaaatgagacaactgaaactcaaaagataaacaacttgtccaaggtcatttgatatataaaccattttggcctgtagggcacaggagagaacacttagaagactttggagatgtatcttctgacctcccctataattgtgtttctggctattaaagaatactgtatatgaggttctgaaatgacaacaagtggcattcaacttgtagcaaactggtagaaactttctgggagaacattccggaggaaaaaaataacattagaatttgctttggctctgaagcactgcagataaaaatccctactgtcaggaaagcaatattaaacatcttggaatatatacacatgcatsagttagtgatgctttaatttatatatagatgcttcagtgaaaagggaagatataatgtaagtgtagaatgatgtcatatggaaaaaaacscaagcaaaggatgtagtagggcctttggaagaacctagacctcaaaaaatcagaggcacctggacagaatgatctgctcttggtaatcttctctctgcttgtctgtacccgtcttttatctctgaagatctttgtctctgtctagttyataaggaattcttcatcccttgagttaatacattgtaaaatctagaccactctcttttgttcctgttttgagtgtgtgaggaaggaattctggcccagctaggatcacttgcctaagtctgttgtcatattacacaaacatggcgacagggagccagtccctagaagtggcaaaccaattccagagaaggtgtttggcatataactcaaaagacagtgcctycaacatatagaaragaagacatggtctctgcctttggcctctagggagaatgataacagaagatgcctgaagtaacagcaagatcataacatctaacccatccctgattctaagagtgtgaaaaagaaaaaaaaaagtcactatcaatgtagaaagccaaggaagacttacaaatgccttgtttcattgaatttcaatttcagtctctttaaaacagctgttgtgattttatattcacagcagttttaaggaaattatgtagatgatatggtaggaaccaaacacctatatgctgagtctaaagtcctcagcgtgtttactcgtatcattttctctgtctcatctttttatattccctggcatagattttatcctccagcaataatgggatataatacccaataaatatattaataaagaaatgtgatgccatctctccttcatgtacattatttgttttaattacaattttagcttatataattatgtttttccacctagatcctaaacttcatgaattcctcacacatagcgtagggtctggcccaaagtggatgcctattatatgtgtagagtgaacgaatgagtgattgcttgacaatagcacctctgtaaagcttaggttggaactggggaaatggattaacaaaagtgtttcagcactgttaagactccaccttgatttattcctttttattgttktaacttacaatggtaatatttgcttactctaaataaattcaaagactacaaaagaatgtaaagcaaaaaatcagagtaatcttttcttcctactcctgattccattttccagaggttacccctctgaacctttcagtattatcctttctgagacttatgaatccttatacaacattatktatgtacgtatagaggatcatattttgttaaaaaaagtgatattgctataaaaagtgtgattttttccccacttaatatgtggtggtcatctttcttgtcaatacataaacgtgccagttatcacagaagagaataccaaagggtgaatttgatgctgagrcaatagcttaatagcactatagcagagcatggccttgttattattagcagctccctaaattttgtctgaggatgatttgagctggggttggcaaacaagagcctgcaggctaaatttggcccactatttgtttttgtaaataaagtttcactggaacacagccacacccatttgtttatatattatatatgactgctttaatgctgtaatggcagagttgagttgttgcaatagaggccatacatactgaaaagcataaaatatgtactctccagacattagagaaaaggtttgagggaccagtctatctctgtcttcttggcctagtcaggacccaatatcaaagaccgcacagtatgctcatggattggaagaatcagtatcattaatatggcaatgttgcccaaagcaatatacaggttcagtggtattcctatcaaactaccaatgtcatttttcacggaattagaaaagactattcacatggaaccaaaaaggagcccgagtagccaaagcaatcctaagcaaaaagaagacagccagaggtatcatgttatctgacttcaaactgtactataaggctacattaaccaaaacagcatggtactggcgtgaaaacagacaaagaccaatggaacagaataaaaaacccagaaataaaacctcacacctccaactgcctgatcttgacaaagtcaacaaattaagcaatggaaaaaggacaccctattgttattgctgggatagctggctaactatatgcacaagaaagaaactggacccctacctttcaccatatacaaaaattacctcaaaattgactaaatatttaaatgtaagaccttaaactataaaaatcctagaagaaaagttaggaaatgtgtttctggacaccagctgtgggatataatatatgacagagtcttcaaaagctrtgtcacatacacactatttcacaagtagggcctaatcaaagagcttgagcacagcaaaagaaactaccaacagagaaacagacaacctacaggatgggagaaaatatttgcaaactatgcatctgacaaaggtctaatacccagaatctatatggaacttcaacaattcaacaagcaaaaaacagccctattacaaagtggacaaaatacatgaacagacacttctcaaaacaacacatacaagcagcaaacaaacatgaaaaaatgctcaacctcactaatcatcagagaaatacaaatccaaaccacggtgagagaccatttcacaccattcagaatagttattaataaaaagccaaaaaracacagatgctggtgaaaccgtggagaaagggkgatgcttatacactgttggtgggaatgtaaattagtttagcctctgtggaaagcagttgggaggtttttcagtgaacttaaaacagagctactgttcaacccagtaattccattactggatatatattcaaaagaaaagaaactgttccaccaaactgatacatctacctgtatgtttattgtagcactatttacaatagcaaasacatgaaatcaacttaggtgcccatcaatggtggattagataaaggaaatacggtacacatacacartgkaatactacatggccataaaaaaagaatgaaatcatgtctgttgcagcaccatgaatgcagctgcaggtcattatcctaagcaaaskaacacaggaacagaaaaccaaatactacatgttctctcttataagtgagagttaaacagacaaacatggtacacatggacatgaaaatggcagccataaacactggggactagtgggagggaaggagggggtcaaggattgaaaaagagctattgggtactatgctcactacctgggtgatggtattaatcataccccaaacatgagcatcatgcaatatacctrtggaacaaacccacatgtgcaccccgaaatcaaaaataaaagttgaaattacaaaaacagataagtagacaatgcagtgaactcatcgagtttgtagaacaaaaaaaaaaatcacttaacgtttgtggttattgtacttcctctttcttttggcaagtttatcacaggtggattcaagtaactgaaaaagaaacaggaaaagatgcctggcatgcatggctgttattcctggcactctctctgattagggtcctgtatatatctctcaaaacacacacacatattcacacaccccacasatctataataaactaggggttttycttattatcggatagttaataaaccgcagcataattaaataagagcctacatttattattgtcattcagtaagcagcatatagttttggatttcctggttggagtccatccatagttaataattgggtaggatatgctggyatctcaatcaggatatgaatgattagccaatagttccttgaacagwaccttattactaatgaggagcagtagattgagttgagttttaagsaacttcaggatcactctgttttccttggtgggagaggagggagtgtgatacagagaagtaagtggatcaggctgcatggggttgtggtgacaaggctttgaagacayccatttatactgttggtcaagtaaacagtaaaatagcacccttggatttagggagtggtctgatcttaaattttaatatgcagaaccaccccccraaacgtatataaaatgcaaatcttagagtcccagccacagacattcaggctcaccagacctgggtcagagcccaggaatctgcattttaaataaccccctcaggtgattctaatgggaacattcctgcaccaaacttggagaagcaytgcattcctctaagatttgtctacctcattccatctccctgtctatttctctctctttgctttctcttkcctggtctctatcccttcctttcattacatgtcatgtaccttgatagagatagatgcctgcactcccatgtctagaggtacatggttgccaatgaatgcaaaactcagaaaggagactagaactctagccytctctttcactcctcctctttcctggcaaggtcrcaagaacagtcatctatttcatccaagtgtttgcatctaacacaatcactgcattcagttttgagatttgtcatcaaacaaactgcacccttggtaagtaataccattgccctcctgagctgtggtgctattttcttcttttgcactcccttctttgtaaatgctcttacagggttgctaatcctcacctatttcttctttctcggggactttatgaattcaaacaggctcagacagactggcaatttcgtgcagtctccagccagacctgttttattcttcatgtcttagtaccttgctcagaatttattgtataaagaagtgcttagtaaatgtttggtgaataaagaatgaaaaaataatcagtgcctggatgaaatgaagcaaggcagagtaaatctcagaaaatttacttgcagctaagtagggctacgaggctctaatatgcaaatattttatttacttgaaactgggactgtccatctaaaactggttgatggctagactcctgatttgaaagctatttctattaaatctgaacttgtgtctggcagctttctcctatcctagcagaggttctcccacccccatacacaagcacaaccctgaatcgcaagcattgtcaaaggtagtgtattttctgttttttcagttttctaaaatcagagaaggtatttcaggaaagtgatttctaacagataggtactctatcaggtaaattttgatcctccttgaccttcattatttttcttttggctgtatccacattttgactgtcaagtaatgggacattacacggaaatagaaaagatatttttttctcctttcaaaattacttatttgtaaattaacccagattgagttttcaacattctacatcattaaagtaatgacagtaaatgatagtttataatatttacaacatattggagtagaaaaaaaatctatcattagcacatctttactgtacctttttaatagtgtaatatcatttgacattctgggcattatttttttcagatctgatgaacaataagaatgcayccccttccctgcattcattttctgctttttacttagaattttctgggctttggcaagcactgaagtttatggttgcgcaggaggttagtgtgagttggaggaaaaacttaaaacttgacaggtggtgaagtaaggaagagctcaccatttatttccttcccacgtatcttctttgttcatttgggattaatatttttttcaaaacaaagccaaacaaaaaaataagagaaggtagggttctcaggagtgggtggcatatgagtgactggaagcaaaaaggagagaggggaaaatggtgaagggacaaagagaagggcaggctgagagaaggagcagctggtgggagcagggagcagagggaggctgcttaaggaaaaactatttttaactgttctgagacctttttaaaagtaaaaaaaataacccctcttctcaagaagcccccacccacgattgctttcatcctcccactctggaaaaagtaatgttgttttcaattgtgtagaaacacattttagaaagtaaaaagccccatttaaaagcatgtgtgaggagcctgtgtttctgctcctgacmtagaacagcattgtctctgcggcstgcacatcacctcgggtgcccccaaastgctttcagacagtaacgccctmtaatgggttgttgtattttggatttaccaaaaacaagctatacttactgtgtgcttcaggggccagctcttgggttggagctttgcagcaccatcttgtttgtccaccccgatcaccctgtgaagtcatgttgtctctattttgcaaagggggagccgagcctcaatgaagacaagtcacttgttcaagaacactttatggtacagctgcaatattaagtcaagctccctctcttttcttttttaacttttaattctgaaataattttagagttgcaaaaaaaaaaagttgcaagcataatgtaaagaatccctctaccctcctccctcagatccccagatattaatactttacttacttccattatattttctctctctcacctatatatgagtgtgtgtaccatatatgttatatgtgtataaatgtatatataatttttagtgaaatatttgaaagcaagttacatgatgcctctttgctcctttagtgtatttaaacaasacattttcttagaaaaacatagtrtaattactgamccaggaaattaaccttgatataaagctatttctggtctgcagaccttatggaaatgctgccattgtcttttatttgggtcyaggatccattccaggatcacacattgtgtttagttgtcctgtcttttagtgttctttaatctcaaacaattccccagactttgtctttcatgaccttgacatttttgaaaagcacagcctattgcttttcagaatgtttcttaatttgagtttgtctgatgtggcatttcttcatggktagaatcagattttgcatattggccasaatcctacagaggtagtattatatccttcttagtgcattatatcaggagacactgatgctcctttctcccattcttggkattaactytgatcactyggttggtgtggtgtctaccaggtttctccaytggaaaattgctatttttccttttgtaatcaataagtatcttataggaatatacttgtagaaaatgtagtatgttttttcttatacttttacccattctttttttgcattcactactactgattcttacctgaaacagttacttttgtgatgattgttaaatggtaactttctaatttaattactccttatttatgacttgaaattctgtaaggaagggcttttctcccccacctcccatttttttaaaaataaattttattttgtgtatttgaggtttaaagtatgatatgggatacatatatacaataagatggttactacataaagcaaatcaacgtctgttatctcagagttactttttttgtgaagagagcagctaaaatctacttatttaacaaaaaactctaattcaattttattgactgtagtcatcatattgtatattagatctctagacttgttcatcctacatgttactttgtatcctcccccccccctctatmtatgtgtgtgtgtgtgtgtgtgtgtgtgtgtgtgtgtgtgtgtgtraagtaraatcgtagattttttttaattctgtagtctctgggatattatcagtttttattttattttatgtccctrtttagccaggggaatcccttcattctggttcatgtgttcttttgacctgtccccacaattttggtttttctttgtttttttttagccatttgtaactttgtggcaccacaggatattcyaatctcatcttgttcctgtcctgtcccattaatggagccaaccacttctccaaggaggtctggttccttttttatttttattttttggaraatggtatttagaaaccaagatctggacatcaggtatgctaatttatagtggggtatcattgcttcagcctctctgtgagtagaggtaggcaatacatgcgtgtgtatttatatgcatgtgtacttatacacatactatatatatatttccatatctctcagtttatatattaaaaattatgaattcacagtgatgctttcaatcctgtaataagtcctccttaggctgctctctttctgcctgaaatatacttcagagtccttgaatgatttttaattgtcaatattttcagcaacacttctcttttgattgctttgtttgctatgaaaaaatatatttctgtctactaagttttatctatcttatttaatcagttatttcttataaatagattattagcacataaatacagtccaactctcctttgcycagaatagaagcttaactttttgccttaaattgttttcagttattgttttccttggatgggtaaaatgaatgttccttttacctttcagtcgtgtttcactttggtgattattttattttttgtgcttgccttaggaataaaacatagtgtttgggttttttttcttatttatcaggattgctttaatggtttcaatcatctttctttctttcctttttctcttcaaaattaattttaaaataattattgtagtaggaatcctcaacagctgagctgtaccatctcagagtaycattattatcactctgttaggtgacatgataataatcatttctaatctggtgtctcactacataaacatgcattgctaatcacartatgcctctgatctcatttgtttaaaaaaagcagcagcagcagaagcagaagtagagaataagagaagaatccttctgaaagctcttagtttggccatattaccccacagtrtggcttgtataaaacactttcactttcttgcacgaggaacataatgggaatccaggaagacaatatgartaattttataagttggctatttaaagagaaatasgcttttctgagtttctggcatatccaacttaatattacagtactggacctcattctgaatacttagaatatttaygacacttgatgtttggactttataaaaggtcacttgaaaatgaagtcactttcattttaaagtagaagaaagtggatgtggaaaagggaagagcttttaaggaaaaccatcatgtctgttctcctgtaaaaggtcttcatttccagtagtaattgtatttcttaatggctttcctaatattagatgattacgtcttgatgtatgaaagtatttcagctcagggattattgaggctcctctggcaaaatgactatcatacttacctggaacttttgtttcagcccaagtaacaattgcagatagacataaattagcaatatttactcagaactcacacgtagctgtttttcttgtttaataaggtacttttgcttacaaatgatagttaccagttaaagccatcttaagatcaaaaagggacatcattataaggattcagaggtatggcataaatcacaggggagggcataaactcagcttcatgagaatgccaggcctcagraccaggacccaagaaaactattctctttagtatctctgtgtcttctataattgatggccatgtattatagagaataggagttctacaaggctgtccatggtaaacaaacaggatctttgattcctattagtctggggaatgttccataccacatccaccaggtctgagagcttcacggtgcacagtagactattaaagttactgagaagttscatggaacagaaacctgcttaaccttctttaatctactgattyccaaastcatttgaccattgctttgagaaatatcattttaaacaaacactcgaataatatggaattaaatttaattggattcatggagttctattgtattattttttaaatgatacaatgagcacttgttaagtgactagttgaaggtcacagtatatttttgagcctcttggtctagtgctcttcccactggtgcttacattcgtggatcttggctgaggaactgtactgtcacagctattcactttgtgcccataccccatcaccctagcattttaaaggagctccccactttaaattgagtgattgattattccattggttctcctgacaggcagtctgctattttaaagatgacccagcagctctagtttaaaatgtgcctttatttcctgtgtgtgacgcatatatgttgagcagtttctggtcataggaactttggttccaaatcttattaaggtttttgtcattccagagggtgacattttaggggggcwgaaactggctagcatgttagcctaatccttgaatccaggcaaaataaattttggttgagtttgctgtaacattcacccattcgttttcattgcttcatgtcttggatccagtgaaagggagacgtgtcaaatgttctgagaggctgtagattcacttggtaattaaaccaactagtgcaaatgtacaccagtgaaaacagtaaagtttcccagggtaagtcttctgggaaagtgagaaaagccaggcagaaaaagggtaattgaatatcagaaataaagagctgaggaaagtgttgggggagtaaacaccaagagaagaaactattgtaatttctgccaacaagaacatcatgcttttaaagtgcatgttgttttttttycccctttggmacagttagcaggagtagcaaamacagtaacaacgtgacctcagtgataatgtgtctctagtccatgaagctgagccaggtgttgtattaaatacctttgagacagaaactcatttytaaaatccagacatttgctgaatgaatgaatgaatgaatgaataagcaaattttaatttgtgtctgtctagggataagaacttttgatgctttgctcttcaaaggagtttaaaacataataagggagagaatacaggacatgaagttagagaagtggcatgggagaggtaatmccatagaagtagaggaacaagagaaaatttccatccaacaaaggttggagaaaacttccamcytttgttccagtgaacaaaggtttaacatttgtatgggtgcatcagttaactgtttcataaaactcatgtgtaccaaactgtccccagtacttggtggattgaaataagagtcatttactctgattcttgtgtctgtgggccagcttggcttgttttgactatagggtgtgagttaagtccatgtgtctgtcaccctccaagacccagcaaaaaactaagacatctgcttctcatagtgaaagacaggaatgcacatgacattttaagcccctgctccattcacatgtcttaagccaaatcaagtctgatatcaaaggaatgtgacagtatactcctctcaggaataagaagtaaagagagagtgaatatttactgaacaacaatctaatttacttcagtgggaaatacagggttatttygtatatctggtgaacttgttaggaagtagcagtgtttatattgtaaaatcaagctggaggttgcaggacagaggctagaattccagctgagaataatattacaaagggcaggagtggagtgattttttccagtgagtcaagggccacaggttggtcaagggaaatgggcactgaaaatacctttccagaaacacttacttagtagggtgacttcggtagatcatgagaaaatagatttggtagaagattaaaagcaggaagctgattgtttggggctgaaaacgatgaggggttagagaagcaaggtaattaatatcagcgtctcttttgaagacataaagggcagaagagaaatagggttttgaaatgagagagagcaaacgtgagacgaacataagcatgtactatgagagcctatattcattaaagaaagattctggggctgtttgttgtcccaggataatgagtaataggtgatagatacagagctgtcatccttttctctcttttaatataagatattttgtaagatgataaggcaaggtgagtgagtaaggcaatcccctttyccaatagttttgttatatacagacttaaaatgtgacatattaaaggggtcaggaaactcttgaatcttgagtcaaccatctctactacttaatatgctcaagggaccttatttttaaacatcatatgggggcacaatatttacctgtatggttagcaagcaacttgctaacacaatcagtcacttgaattgttaattaatgtttaattttctaattactcacacctgcagaaatttcccccaataggaaagaagacctagtttcaaacttggatgataggagttggggttttcttccatgaatatgtaagcagtcacaacttctgtgtattccctggcatttagtaacacagtgcagtcatctgttgaccatgagcctataacaggataagttgggtgtggggtccagagaaggagatggttgaatctctcccttcaaacagtgaatgctgtagctgggaaaagaaggcatacatagacaaaataatgaataattaagaaagtatcatatcctgataccatgaagcgctagcttcatagatactgtcaatagagaatagtacagaagatgtagagtggtatatgctgcaagggttaagagcacaggcttgggatccacactgcctatgtttaaatctttgatcgtccacttaccagctcagtgatgctgggcaagtccttgacttttttaggtttcagtctccatctatagaatgggaacaataacggtggctaccttgaagacttaattggaaagactaagttaatatatggaatgtgtaaaacagtgcccagcacataagtaagcatgcacaggctcttaaatattctaatttttattgttgttggtgatgttttgttgttgttgacgatgttttgttgttgttgacttggttggtttctttattttgttgttgatatggtatgggccacaaggtttagagaaggtgwtgacagccatcgaactggacaccttgcgtgatgttcttaacattagcaccaaatcatctagaaggagtctttcctagccattctaaatataaagggctgtcttctcaaatgacaagctagggttaatgtatccraagccactttgatttattcctcttaaagcaagagtgtttgtctctcttcaagcaactgcctgttgtcatcaggctaaggcttggtaacactcttggtttctcctcctctacctttgtctttccttcctacctcatgtccttcaagtctttattacctgtattagtctgttctcactctgytagtaaagacaaacctgagacttggtaaatcataaagggaagaggtttaacggactcacagttccacgtggctgaggaagcctcataatcatggtggaaggcaaaagagaagcaaaggaacgtcttacatggtggcaggcaagagggcttgtgtagaggggaactccgctttataaaaccatcagatctcattagacttattcactatcatgagaacagcatgggaaagaactgcccccatgggtcaattacctctcaccgggtccatctcataacrtaygggaattatgggagctacaattcaagatgagatttgggtggggacattttattatcactggaaagtcagcttcggggagccccagsctyaagtctgggcagacaattctgtcccccttttgagcattttggctaactttgctgcaggtcataaacagatagacattcaacaagtcttattccagagatgctatacaagctgcatttagaagggtgaacagcagtcaggcatgccagacatggaaagagagtcattcatgtgaagacaaaaaaacacacagcctcagaagtgggggaaatgcttgttatagtayagaaatcaagaggccaatacagayacggttgcagtgcccggtagaawtatgatgcaagccacttgtgtaattttagtttttcyggtagtcaccataaaaagtaaaagaaattaataatatgttgttaaaactcgatatatctaaaatagtatgatttcaacatataagctgtgtaraaaattatgaataggattmtttcaccttctgtttcccttgtactaagtgtttgaaatctgggttgtattttacacttctggtacatctcagtttgggctagccacaattcaggtgctcaggagccgcatgtggctggtggctctactctattgayacagcaggactagggcatggcaagcaaggaagacagtgctagatgagggtggaaatatagagggaggatcctataagaaggggctttgctgactacggtaaagtttatgtgacctttgacagagatttctcttctaaagagagtgaaaaacagtttgttaaccataaactagtcttcatgtcatcaggtagatggacctgtaggwattgctgcctgttccctgcctaggsgccagcactcaagtggattttagccgaatcccttaaaggtaagacaaatgccatccaactattttgaagaaaratrttaaggaatttacctaaaaggcrtacagaataaaactggggaggaaaacccaggcaacctcattgtaataaccttctgtctcatggactatatccttatattgaacagaggcaccctgcctcgcagtctgcaatgggcccactctgtttgcctgtgacctctaaacatrgctgagcagttggaacccactggtggcatcccggaagcacctaaagaatgtgacaaaagctcccaaatctttgtttgtcttccctaatctacccagcaggggacagagggacaggtgtggattgggttcctgtagttgcttcaggtatcagataactcaaaaagtcttattaatgaaagctgtatcatcgtcatgatgcatgattggttcattttgtcattcaccagaagtstggcatgctgaggtgctcagtaaatattttttgaaagaaccagtagataaaggagcagctcyttattgggcaccagcaatatatcaggcactgtcagaagccgtggcttcaatgatggtgatgtagagacagacatggtccacacctccatcatcatatcttgggattaactgcttcagaacacctggagagcttctgtaaatatgactgtcagatactcacctacctggtragtcagttcttgagggtgagtttggacccagggcactccaggtgatcctgagccctgtgacttggatrtggccaccaagttggtcattgcaaagcagcatggtccacaccttgtgagggaatggasgcaatagggagcaataaaagcatgtaggggggatccctataccagcctggaatgccacctggaagaggtgacttytaagttgcaaactgaaggaccagcaaaacttgagcgagtaaagagcgaggagaaaagtgtgctagacagaagaaagtttttatatggtaaatttatattattttgctcctgcatcttagtcacccatctcttaggacaccgtagatgtgtgaaagtgcttggaaaggtgtaaacccctctaaggatggaaagtatgactgttttatggattctgtttgagggaacttcagttgattgatggctgagaaggatgaatatytgataggcagggaatgctctttatggcacagaatgtctttccaagaagaaactttactagartcacagcaaacctytcagccacagtgcccaaaatgtcatagttarttgaattatttactatgaaaatgatggttaactgaaaatctctttaaaatatatgagtctcttttactgtcttggacaaaagcgctatacaagcaggggccttacctgtctctttgctggayctgcagcccctggagcagtgttttatgtaatktatgtgctcaatgaatatatgttgtcagaatgtgtaattgacataggttacattagaaattttaactttaaaccatttgttttgtcatgaattgtaacaggttgggattaaactatacataacctgtaatttactgtcattttgaactatttggatattttttataatacacttaatacacaaacacttttcattatttaaaaaaaagtagttcaaattmcaatatataaaatatgaaatttctctacttcctcgttcatcttcataggttattactgtcagatgactggtgtgtatctttccaagcactgtttcatgacttaatatccctttatgtacattatctagatttgattataaacaggatcatattatatttttctatgattacctttttgtctttcagagtatgttttggagctttgtccttaggatagcaattacaagtttactcattctttttattgacttamtagcatttcatgtatggaartaccataatttatataaccacttctrtattttagtaatagagaaacagtcttacaataaacatccttgtacatatgttttatgtattttatgcatattaatgtaatcatttagcatagattcttaggaccgtctaattttttttaaaacaagaatagcatttctattcaatcattgccttgtttcttctttgcctgttttacttaaaaatcaggtagaggaaaaaattatgtttcattgrgcatttttacttggcagctttttatttgagactttaattgtgaaatttaratgygtatgaaatcaagtatttcctctaccaaaatgaacagtttttacttgtgattttggacatttagtagtttgtggcccttgtactagggagcactatgggcctaggataccccttgggtggggtttctaccacttccctgccatttgtatcatggtcctagtaatggaacacactgaacttgcacagtgcacaacccacacagccgtatggagccaacatgatgtctggagttttgcactgttgctatttttactcttttcttgttctcaagatctccagcttaaccctgggaacttaagatgcagagtcaagaccacttaaactgtgctgttaagaaaaatcacagttttatgcccctttgggaaagcaaacattttcagcttggaaatagacattgggacctgccaaaaaaatactttttgttttgttttgttttgttttttttgaggcagagtctcgctctgttgcccaggctggagtgcagtggtgcgatctcagctcactgcaacctctgcctcctggttcaaagaattctcctgcctcagcctccagagtagctggggttacaggtgtgtgccatcacacttggctaatttttgtttttttagtagagacggggtttcaccacgttgaccaggctggtctcaaactcctggcctcatatgatccacccaccttggcctcccaaagtgctgggattacaggtgtgagccaccatgctgggcccctgagtgatttgttgaatgaacaaatgaatggataagtgtgaaaccattgaaactacacttgaggctcctcaaaccattttagttattgcccttcaaastgttagtytgaacccaccatcactgttaggcagcgacaagaacgtgctggtttaattgggacattcatctagttaacaagctctcactgggtatttaatgatggaatggggctgtcgcgtggaaattcccagtataccacaacacttgagccttcatgtcgactaaaaagaaaaagtgatgagttgctgtagaagtgactttcgcaagatacaaggtcttcccagatcaatatccaccaaacaacaatrgcaattgataagttaagctgtgatgagccagatagtacctgtgggctctcttgacaaatrtgactagcaagccctttgcattgtacatcatgtaaggaggaaatcaaagatgaaatagagggttctttacttttcccagttaaatgagagattgtagttttgactgcccatttgttttagagtatctttctttaggggaaaggatatatattcattcatagtctgtttttctgctgtgtatgtgtgcttattcattcattcattcattcattcattcattcaatacatatttgtgaagagattgttgtatggctggcatagtgctaggtcttcagatagacttccatatctatttagcaaatgtatctataagtgccattttttagatatttcccctaatataaatatatttgctatctactttagcactgaattccctgagcaaaggaatagagactcatgttcatgaataggtttattttggagttgggagcttttagtccctgggtatcttcttatgctgtgcatttgggggacaggtgcatctattttctagtacttcatgagaatttttgatttgcctacctctgtgataggcactgagagtgactagcaaaacatgaagcgctgtgtcagtattcacaggtttaaaaattttgtctgtcaggcgcagtggctcacgcctgtaatcccagcactttgggaggccgaggtgggcggatcacaaggtcaggagatcgagaccacggtgaaaccccgtctctactaaaaatataaaaaattagccgggcatggtggtgggtgcctgttgttccagctactcgggaggctgaggcaggagaatggcgtgaayccgcgaggcggagcttgcagtgagccgagatcgtgcctctgcactccagcctgggtgacagagcaagactccatctcaaaaaaaaaaaaaaaaaaaaaaaaaaaaaaaaaaaaaaatttgtcagggattaaaatcaacctataacaaatagtcagtgaacagtacaaggtggcccatgattacgtgaccagaagttatgttggcgttttgagagggcgggaggtcattagggccagaacagtctaactctccatcttgttatccacatatttctaaacacatgctgtggacatgagaatataatgcatgcatggagatattgacaaagtgctctaattagcagaacattaataagtaaaaatcaactcactttcaataaaacctaatttcactaaaaatcactggaccagcctgggaatgggaagctcttagatatcgttgggaaattcattcggagtatcaagataaaaatgagaacaaggtgagaaatgaacttcaaaactaagcctgagtttgacttacattttaatttttttttaaataaaagagctctcacaacctggggatttccctcmaacagctggtgagtaccctgtactatccccaccatcccatcctagactgtgtcaatgtccatggaaaaaggacttctatcattttctgggaatgagttcagctgcatgtaacagaaaccctgcctttaacagttgcttaaaaaaataggggtgtattttctttggtaacaagaagacctcctggaggtaggcagtgtcttagtgattgttttaatctgcctatttgcaagatggccacyctatttcctggaaccatgatcaaattcacggtaggaagaaagggagagaggtggcagcagcagtgttgctrctggaaaatcatatgcttccccygagtattccccagcagattttcactggcttcaagatggtctgagagaatgagtagttggccatgggatgggaacaggcaggagaaaaaggtgttaggaatgagmamtgggcaaactgagcagagtttcctgctacasgaagctctgtagatgtgtaattcagtgcaaaataaaaactcaatakactgacttgagaagcatcttgcctctaactgattaggtctcactttcttgctgtgtaaaacaaagggcttgcctaggggtartctatattttcagaagttttcctgttatagcattccagaatttctcaggtacttttataatgattaagagctytatgatctcaaacacagcataattacagagagttactgggtcctaggtacttaatgtgcatgatcttattcaaccctcaccatgcctctgtgargcaggcactattatgcyatccattttacagatgaaagaagtaagtgcaggttaagcctctcrgtgacatggttaaggtgacagttagatcatggccaggtcaggattcatcccaggagcatggctgatcccaaagacatttctttaagyactaarcattctagctcataaggttcctccacattctaatgctttctgtcttcttcaacctggctgtatgtgtaatacgcatattttcatgattctcatttttccaracttcctagttttggtctggaaggtcttctctttttgtgagttgattgctctttgcccaatttatgtcctaaagaacagtctcagggcaaggcatgagacttgaatcaggaatgaatacagtgagtcatagtgcctttgaggccagctgtgtttatgtttgaatgccacctcccacttgctagatgtagatgtgtgactttgagtagggtaagtgttatatctttaagtgtcaatttcttcatatgcaatgggaagattatgatattaaccaatggcwttttaaatgagaagtaaatgagataatacttgcgaagtgcctaacacagcatgtgtcagtgtattagagagttgataactgtgaaartggttaaggtgaaagggatgtaaatgaaaatacaaacaaaactggattatttggcagatcctaaatactctttgaccagtatagtctcacattgttctccttcattctcagtgtgcttgtgttgtgtgtatgtgcacatgcaaactttgcttttcctcatgtctgctttgtgagctagagtcagctatagctatgacagctctagagctgctcacatggtaggtaggttctgtctgtccctgtccctcatcattcagggtgtggatgatacaatgactgtttactatgcggtcaaaattctagaagtactgtctgtagcatggaaacagagtcttctctgcatattttcaaatgcaagatagagatggcagtggtggacaaggtatragggtggtttggttgggggtggggtgcatcakttatactgtgttctttcattgcagctaaaaatttcaaaaataccacccatttcggagttcagtgaagtaaattctgagaatccaaacatcaaataagagttataaacaacatagttttattattactaggtaattattttacttttatgtttcattaatattattkatttaaatcaaattagccatacctataacttcaggcaggaaggaaaggtataagaggaaaatgaaaactttcctttccttctcttctctgacatgctggcctcttgtcctccaaatattaccattgtgaagtttcttctgtagcttttcagaaaaagaaattatgcacatgttgacatctaaacaaaaygacacggagcctttaaaatctttacttaaatggcatattatatacattcttcacacttagcttgtttcaaagcatagtatatcttgaagagcagacctacctcattattcttaatagctgtacatattgttttgtattgataaatcaaaacgcgtttaacccaatggatggtrtatgggttttcttctccatttttttgtttgtttttatgggcaatactacaaaggacattcttgcacaaattctggcatactatttggaagtatatctgtagggcaaattcttagcaatgcatttgctgggttaaagggtttgtsaatttgccattttgctaagagattgccaaatgctggatatgcaagaaatgttctctctcaacaaccagacagaaggaaaatctcttcattcctttcttttaatttaatttgcttatctttcaatggccttctaaaaaaattgaatggcatgtttkttaggtagattttgtttggcagtcactctgggcctctgcttttattaagggagggaaggcagatgagctgtggtaaacatggataagtcagtgttctggcttcctcaaccaatgtgaatttggatggactattttttctagttaaagaaatctccatatgctatggtgatgtatctggagtatatcagtttcttgaaacacaagatgatttttattttgcttatattcagtctcatttagtaactgtcaaaaaatttaccgtattgccagaaagttgatcttgtagaccagatgtcagtcgggaccttgttgctcaatggagatctaactataatgtactcaaactaccaattccacagttcatgagaagttaaagttctctccaccttctctgtgaattttgtcttcctctggtttctctgtccaagtgtctgttttgccctacttaacaggatgtgcaatttgtttgcatgtatctgtaacagtcttctccccaggcattattttaatttagttgtgaactgggagatattgtgaagcggtctcattgtggaacatttcttgctcctcagttgactcttctcctcctccatcccttttcacttcttctctcctactggaaaagaaggtttgcctttttctgcaaggcctttatggctattaacatctattccctccagtctttaactctgagatggtttaatgaacatgactctcctgcaaattctatatgttttcctgaagattctttctcaaaccaaaaaaacaaaactcctccatatccattataatttcatccaaaaattcatgttaggtcatctcccttacaaagaacatttctcaaacagcgtttctgtttgtttttgtttctgttttaattagctggcattctggtgtaaggattaacagaagaatgccttcttaggataaatccagcacttcagtagaagaaagatcgtgatctttgggttgggagacctggggttaaattcaggccctaccatttactcattgtgtaatacaagcaasttaagttttgaagctttattttcttcactagaggagataattcttaatggattgttttaaatgttggaaatgaaaatattaagcatccagcacagtacttggaatgtaggaggtgcttagaaaataagagtgttacgacagttactctcaaccaccctcattgtcattatcattgaatcctgagctgtgtgttttcttcactccacagcatagaatacatttccactctcattcattgtttcagcatctcctcatctcaactccatagtaaggtacctcagaagaaggccatgtctaattttgtacttggttgttgagcacacattaggtactcaatcaatgcttattgattggtattttattgattggtgatcttttggaggtctgaaaattcatctcctttctacctttctggtaataacctaaggaaacagaaattcatgatgttagaaagaatttcatttcttccccagctgccttattttgagtcaggtctctgtactctgacatgagacrtatcttcattttttccccttctagcagtaagtcagtctttctcatttcttgctcttttccatgttgttttgccaatttctctttcttttgctttctctcctacatgtgaattctctcctgttcttctggctgaaattcatctctcrtgtcataaatgcccttccttctgtatgattcccttgtctgctttcctttcatatgatctattcaccttatttgaaagaaaatgtcatttgtttcctagcatccgatctgaataacagtgaaatgtttgtttaaaattaatgttttgagcaaagaaccctctctgtttacttgacttgcaatattttaatatttaacactctatgatgtaaaacttgtggaagaaaaatatcctgctgtgatctggttgcctaacaatttacattcagctgcaatattttatttgctataattactcactgacaaaacagggaatcgaaatgcaaaaatacaaaatgctctcagtttgcattttattttggaatgtgaaaaacccttggttcttgagggaaagagcataaaaaaggaaagctagcttagtcagatatccatctctacaaacagactcttcagcagtaagacgcaaaccagagaggaaactgtagggcttctggagggagttttttaaagaggtcgtatgttgtggactcaaggttggagggcagggcctcgggccatcacattccatctcttactccagagtctcactgtgatttttacacaggtcctttcgctgtgtggcacctatggatctgctcwcttaaaccattgaaatttattagatgaaaggtaggaatccactgggctcttgttagaaaacgtcctactctaacactctttccccatcctattatttgcactcttgaaagtgacaggtttcattgggattgtgggtctgaatggagcatgacagccaacacctaggcattgtgtggaccaaccaatagctccttgcttgatttccaccactataaacaaagtccttcctggattcagagatagaaactctaatatatctagatcttagctccttcacacatttaccccaccttcatttgcagtttgaaaagtgaaaagtttttgttcctgaaattctgaataagaatgctacagtgcatttttccaagaagtaattaataagagaaatcaaaacaagatttttccctctgtgattaaatctaactggtacactccagtagaaaacaaaccaaaaccattccattgattttggtatcacactgggggagaaaagtcattatacttttttaaaatctggaaatgcctaagacacccatgtattgagttcttataattgcaaatctcatttttctcctactaagctgctttcttcccaaatgtgccacagttttcatgtaacttattcaaagtaggtagtatacttttaggagaaactgcagaaccatttcccaggaacagttaatatgcattttaatatttctgacacataaagtagttaatacaaaggattaatcattacataaaccatgtgatgggaggatttggagaaagttcttagaaataaagaactttgttatgtgatgcatatttaaaaagatagttttctccaagcaatcaataacacaggatttagtgatccttagttagtcccccagtattgattctacggtctaaattcattataatttggttttgagatagctagaaagttgattcttgagtcaaagattttctttctttacagagaaactttttgagtgtgtaacatgaggatggaattcagaaaacatttgggtttttttttttaacaccaattataccttccattatgttctttatttttgtttatggtttaagaagttatagaggctccccagggttaataacgtcactttcctgttgctgtgagtctggcaatatgaaraaattggatgactaccatttttcccccatgtatctgggtatgttgtttatcaaagcaaaaggaaaacaaaacaaaacaaaaaacaacaactcatggagcacggttaatgcttataagttcaaattaccctctatggatgacacatgatgtgaycaccccatgaagacctgttgaagtcaaaccattgtcgatttgaagaatagctagtaaagttttataaggaaaaggtaaacttattgcaaagctacaaggagtcttgtactagaaggggagacccaacaagaatggggggagctctaggcagccctcattcatgaacctcgtaggcacagaaaacctctgctctttttgttgggggcaatgaatatttgggttactggcggctaatcgatatgggcctgcagcaacctcagttcttgcctcctgagaaagaattcagctgaggggcataaggcaggaaaagagactgagacaagttttagagcaggagtggaagtttattaaaaagctttagcacaggaaagaaaggaaagtatatctggaagagacccaagcaggcactgtgaaggtcacatgtaacgtttgaccttttgacgtgggttttatatgttgttgtacttctgggccttgtgtcccttttcccatggttcttctcttaaggtgggccacccacatgtgtgtggcctgctaacatgtgggaggtgagcatgtgagtgtgtttaaraagttgtatgtatgcccacctgaggctttcttcccttttccagtggaatgccccagaaaaccatattctgccattttgtctcttaatgcgcatgcttgtgctcactcgcccaactcctgaaaactgctgattaccagttacaggtgtttcctatcaatataggaagacggtctttccctggtgctggctgtgacaaattattattttaaagagagttaacaaccacctgaccatcacctgatggtagcgtggctttcctggtgggggtgttgggagggccctctcctgccccatcacgcctgactacctacctactgtaacattttcttcgttttagttgccttgattttcttactcactcggttcctatgtttttagaagatcaacctgtatttgaccatcatggcctctgaataccatgactctctgcccaagcttttgccacttggtctgtgtttcccaattcacatttcccagaacaattaatattttgttgtattttatccaacatttcgatgtctcattgtgaggggatttttacaaatcgatcatgttatttatcttttttggccctgaaaacatcctcataatctttcttaacacagtgttgctagctgtcactatcagtggatttgagttggcatgcctggagtagatcatcttttgtgtcactttacagctagtgggagtcaattctaagaaagagctttggaatcagggcagatgtggcatctttcaaagggaaaagcagggaacatttttgtgtgatggcaaactacacataacataaaatttagcatgttaaccatttctaactgtgtcattcagtggtactgagtacattcacaatgttgtgcagtcatcacactatccaactccagaagtttctgtcatctsaaatagaaactctgtacacggtcagcacggtggctyacgcctgtaatcccaacagtgtgggaggctgaggcgggcagatcatgaggtcaagagatccagaccatcctgcccaacatggtgaaaccccatctctactaaaaatacaaaaattagctgggcrtgtaatcccagctactcaggaggctgaggcaggagaattgcttgaacccaggaggcggagattgcagtgagccgagatcgagtcgagccactgcactccagcctggtgacagagcgagactctgtctcaaaaaaaaaaaaaaaaaaaaaaaamaaaccaactctgtactcattatacaataactccctattccccggactactttctccctcccccagcccctggtaatctgtgttctacttttctgtctctgtaagcttgcctattctaggtacctcacagaagtggaattgttaccraaacactaggggttcggtmtaggtcctgctgtttgccgtgcagaaaaccagtcactgagatgatgagtattgccaagaagaagggagttcagtctcaaatccatttccctgaccaaaaccagactatgtaaaaccaggggtttatatagccaggaagaaatgtaataatgtataagaaaacaggaactagggagaggcaaggaagcaatcctgagaatgaggggtccagcatctcattgtcaaaatgtggtgatctggtgagtttcagtttgccaatacttttttttttttttcgagaggcctgaaggtcatttcctgaggaaggaactcagttaaaacaaatataaacttcaagcattaagaccacaaaggtcaatttctacgtctatccaaaaaactatctatgggattattgggttggtttcagaatcacaatatcatcctttgtgactggcttatttcacttagcttatgttttcaaggttcattcatgttgtaacgtgtcagaatttcattttcatggctgagtaatattccattgtatggacctaccacatatttatccagaggatagcattttaaactgggcctctaagcagagaggcatggaagtgtttgttggtggcacatcaaagctctgaagcaacagaccaggcagggttcacattccagattttactagtattccacatattagtatatgacttttgggatttcatttaactcccctagtctacttctttggcgtctgtcatatggacataataataccactcaaagttttgtggtaaggtttatatgaaataatgcataggatgtacctggcttggcttctagtaggtgttcacaaagtgaatcccacttccccctttatcacccattctcccacccccagaagttccacccaggacaaagaatgaagacatgcataatagtggatgtgttcctcttggagtgtgggagaggcagaaaaaagcatcccaagttcccagagcttggatttgagaactttcaggcagggatggcaagatccccagaccaggaagagtggcctctgggaccattaccgctccatctgttctgtgaataaaggtagctggctttggggatctgattgatgtcatgaaaggaaggaaaacatgtttttctgtctgctctgctgaaaacaccttatctaggataaaagtattggcccctctttcaaactgcttttgctgtttcccatgaagaaaacctttttcattttgataaaaagcaatttctgttttcctgccaagccagcaaaaastcttttgagaaatgcttctgctttcctggtatcagggtgtaaaatctgcatgacatggagaccggtggtggcatcatttcagcagctggcaagggagttggctggaagaacaacagagcaaagcacacaccctcccgggtaatgcayttgaatcaatcaaaagcgtatacttggaatctaactgctgatggtttgggtacatctaaacttgtaacacaataaggagtgcagaagagtttctsttacaaaacttactgcaaacaatagaatcgggacagggtggtgcaaatagcaaaacaaaaggagcattttattcttsccccctccccaatatattaaatggttactctcaggcagaaaaccttttagttccaaataaatctcaagtaatagaaccagaagcaaaccaagctttctaatctacaccaaaatttctgggagaaatcttctacagaatccattccctctgtgtgtctcttaagagctgtagccaagagaaacttaaagaaataaggcagaaatattgtacactgaacccctgccctgccaaacctgactcaggaagccctatgtatggaaactgcataatgctcttggcatttgcagagctgtgctctcagataccttccagaagaatgacagtgtgtgaagggggcaggtcatgactattttttaaaggacgtaaatgagacttggttgtgcctgaagcacttccacaacttaaagctggtatttcangtgtctggacattatccaaaatattcatcttggccagctgacaggaatgtttactgagtccttaggagccacttgtttggtaccttcgaagctgcctaraaagagtttgtgttgcgtgggagtggggagtgagtgtaagctgcagcatcagctccgagttagccttcccgttcctctaagtgctagttgtgtgactgttggcaagtcatttaacctctctgagctaaagtttgcatccctataaaatggtgaaaaatctggcccttcaacatgttggtttccaggattgaatggaatcaaaaagctttctctaaatgccttgtacactggttgccacgtggccagtgcctagaaaatgttggtttcctctcttctttcttcattgtttgcaatacagtttttcttggtgcaagtgctaaagcaattaagctctgaactgcaccatctttatgacacagaaattggctgagagcctcagaaataaatctgagaattggaaaaaaaaaaaaaaagaaagtccatcaccatacatttgtcagttggcatctccttgctttttctagttagagtctttcatagtagagtgcttatttctttttctcatccatgtatgtaggacagtgtttgacaggcatttttatgtgtgtggtagtatggggaaagtgacaaaaagaggcccactctagatgtcacttccctgtactgcaagctggagttgacaatgaaatccctcctgaagaaccccagtggtgttttggagcatctcagcatcaagaggagggagaggcactgagcagtcaagggtacccttcttgccatgtgagaaaagtatatgaggtgtagcaaaaagataggaggccacgctttggaatgggggtagtttatttctttttagttctgtgaaaaatcatataatgacagggtattttttttcctgtgttgggcaactgtcctctctagacaaacacgcaacccacacacagatcagtgggagtttggagtatacagcaaaggtagccattcccacttcattaatttcttaatgtaaaatgtaaacaaaaataaaacacaaatttctcaccagtgatagtgatgaaatgctattattattgcggaggctaaggatgatatttaaacatttctacccaaaaatttagtgtagaaagagatctgaaggtataaacaacagtaaccaccaccaccaacacaacaaagaaaatgatgtagaatttgttgattcttttcctgtgcttaacccagcacctaacatctagtagttctctatctaataaatgctgtgttgggtattattaataagcagatcaggcagaagtgttgccatgttctcagtattatctatagggaaaataatgcgctgctgttaagaggctgaaagaacttcctagctccatcattatgatagagttctggataatttgaaaaccctggtgctcattgacaagtgtgtgcttgggttgggatgggagtggtacatcagagcaatgccacttcattggcaacaggatcacagggtgcatttacatttgtcagtagaagctatgttttgttttgttttgtttttctaatctgacctcaacgctttcatttatctcacacacataaagtgttttccaggttctgtattagaagtttttaactttgtgcttgaaaatarttttacactctgtaaccgtttttctttcttttgctctcacctgtccttatttctttccagtaattgtttgcaaacttatcatttagttctctgaagaaatttgaatctaatccaaaactttaaaaaattctatgattaaaacaggaaaataattcatatgtaaagttaaactgatttttttcctatcatagctcatatttagaaatgtttttgatgaytgagcaaaattattaaatttgttctcctctcaataaatatgtgtgatttttcttttccagagtaatcacttggaagaatacaatatatatggcttctgatttacatttgaagcatactctgagtagggttgtggatagatttataagcatgttgaaagaattcgcatatgtctgtctgtatatttttaagaaaatgttgtttctctattgaacgtttggagttttttaatcctgtgaacatcatgtgaggttatatgaggaaaggactctttgaaggtggtaaagtgatgagatgaagtagtaagnaatggagaggaccacaaggaggcacagccaaagtgccttaggtatgactcagatatgacttgcaggaaagcaaaaaagcgggggtgggggatgtcttcaaatgatagactcaatttctttccatcttttggtatctcttaagagatttttttataaggcattaatgttgatagagttctttcatccttgtgacctttcctttccaacttgtgtggctctttctctctgaaggcaatgtgttttgccatagccagttcacatgacraacaataacatgtctaggcaaaatgcatgtcttggaagcaccagagaaaatactaacttaagatttccattatatgataaaaatttgttgagtatctcgtatgtgacagacattttgctaagggctagggacacaaagatgcaaaaggcagaagtctctgacataatggtgagggcaacagtttagaagtgaaagaataaaatgtttatggwctgacatatatatatgtatctagagagaaaataattgggrtagcctactttaggtggtgtggttagggaaggcctctctatggaggtgacatctaaactggtatttgaaagaagagaagaaaccaaccacgctaagaaagagggaaaacacattctaaatggaaagaagatacagaagccaaggtgctaagatgggatggagcttggcattcttattctcattctcactggtcagcatgcctgaagcatggggaacaatgcagagctcacactaagatgaaagccagagaaaatataatactgaagactctattttaagtgtaattttatattttaagtgctttgggctggcaggtttaactgccataaatttgacttyctgataaataacacatactttgttagtgtaagttacattgcaaatattacrcgggacatacttatactaagaaaaaattatatgtgtaatatatacttatatattttatatactatttatattatatataatatatatttatatacactatgtatatatattttagacatactttttcccatcccatcctagatgggatgcccctggtggctttaaatgtggcagtacagtgatctgattcctgtttgtaaaagatcagrtggtttggtttcctgtctggctgctactttctgattcccaggaaaaggcaggagcactctagccagttcacaatgtttatgacagatcgatttmtaggattccctcttttccctcctactgttttcagatgagctgcctactggtaaaagaaaaactgtagacaagtttaatttaacagagtttgaccaaagagcagtcaactaatcgggcagccctcagaatgagttaccaagaastacatttgccaaagattctarggactctaggattccctttagtacatgacctgtgttggtggctagggattctagagtttgagtctagtttttcagggtgtactcgtgataggcaaagctgccccaggatgccaytcgttctattgctgctctgattcctgctagaattaatgctgttgcttgtttatttctggtgttcttggttcttatgggattatagactgtgacccctagagaagcaagagtggccatcctacattcacctctgttccaagttttttatatacaagggaaagccactcctaaaaacaagtggctcatggggtagtcaagagtgaatatggggtatgacttttccccattaatggccacaaacaaaaattagtccagttggggtgcaaatagaggctccacaacatctgatatctatccattgctgccaaattgggtctgtagagatattcttgccctgttccaatggagatacccaaccaatctttgtttcacagagtgggtcagtactcctaccttcccagattaggcagttgttttgtttgtttgttttatttttttcctgtatgttgttatctgagagaagtcaccatatatggtttgtttccttgctcacaagtagaatcctgtatacactgttacagccttggggactyggcagcttagagttggatcaaagcattgaagggaaacctccacttttgtgtcattaatacacagtgggtgcaaaatatagaatcattaatgcactacagatatagatactcagatttccaggttcagttaatagcagttgagggtgaggggttcaggtagaatctattaagtgctggagagataaagtrgcatggcaccagtggtgggcatatcttacggaaatgtacttccactctgtccctgttctaggtagtctttgatttgatctggtgtccgagccctgcctcctcagtcaaatcctgcctcctccttaagttatgkctaggtgttcaccttatttggtcatggtctgatcagttggcagcctgtgattggctgaagctcagctgctgttacaaaaaaaaaaaaaaaaaaagcatcctaaattaggctttcggtgtgtttaatagactaagttaggttaggctgcagttccttaggtagggactcaaattacggagacagcctcaggctaaatttaatttttttaacactatgcatttttgtgagtctccgcctaaacatgactcctgctgagaggcccamccttcccctacctcaaaggccccattaggtaccctcctgttatgcagaccagaagctccctacttccttactttagcagagcattgatgccccgtgttataattacttctcctttgctgtcccctctagaataggaaccctctgaggacacaaactgtggcctttcccttgattatcttccatgtagcccargacctgaaacagtggacaagctcaatgactgttgattgaatgcatgaattaatggaggcctctttagagtaatcccctgggccttacaccacattctcttctctgagtctgatttctggaatatcacttgctaaggggcgtatttattgagcactcccagctctcaggtgccatgaaaaatcttggagatgcctggatctaggtctctgtccgtaaggagctcataaactagttgagaatatgagataacccagaaaaagatggtgagcaaagccatgaaaaatacaatgaagtttttgaatagagagtagaatctgtgagactcggggatcctgcgcctggattctgtggactgcataaggatacatgaaagggcttgcagtagaggtctgggamcagcctgaaattatatatatagtattttatgcacatacattctttcagtaagaaagtcttcagttttgttcagattctcaartggcaagtacctaagcctaggatgttggcaaccatctgctgctctaagtgctatagggcttcatgatggactgaagatccaaatayggaaggcgaaactataaaccaagagtagaaaagatgaaatttcttcacaatttcttactagggtagaatttcttgaaataataaaggtaaaatttaaggaatttaattataattaaagatttgtgttcaatgaaataaactatgggaaaaatgaacaaagtacaagctaagaaaatattggagatacgtataatagctgaaaaattacgtctaacagtggacaagagatttatactgggaatatatctttttacttctactaattggtaaataaaagatgtgaattcaaaatttttaataagcaaagatataaatgggcagtttacgaaaggggaactttgaatggctaatatgtacactytcagtattctgagacatgaatatttaaataagaaacactgctctataaccaccaagttgaccaaaagcaacaagaaagatcataataagtattagtgaggatgcataaaaacaggaatttggagggttgtttgatatggtaaagaattagaaacaatctatttgcctgctgataagagaatgaagtaaaattattatttatgcttattatagaatacttgtagtagttagaggaattaaaacctagatcacccctgtctggtagaagtataatgtgaaccacatgtgtaatttaaagmtttttagtagccacacaaaaaagtaccaagaaaatttatttttacttttttaaatttaaagaattaggtgatcatgttaatgctgtattttatttaatatatgtaaagtagtatttcagtatatcatcaacataaaacttactgatatgttttacattcctattttgtactattttcagtatctgatgtgtattttatagtacatcttaaatcagaggctaaattttcattggaactgattgattcatatttaagttttataaaatgtacaactgaaaaaagaagattcatcaagatattccaaaaatatttaaaagtattctcataattaagatacargttttcaaatttaaattaaagataaattaaaattacaaatttagwtttccacttgcatkagccgtatttcaaatgcccggtagctgcatgtggctagtggctactatgtttaacagcttagatccagaggtacacatacatattctggtggttttcaaaagcataatgatgtaaacaaatagaagaagaacataatttgtagtgaaatatcatttaaataagttgagcataaaaccccagtattttatttttcataaaaacacagctatgcgttaaagtacaggaaaatattagggaaaagtaagcctatgtctatagggtgaggtagcaagggatcaggaaaggcaggtcagaaggaaaatccaagtgacatcttggagagttctaggctgctggtgtgctgtgggttaaggagcttgcccaactcagttctagacactcagggttaaaacaaaaagcagcaagagttaactctgttgaaaaactgttaatactggactcagtgcaaaattatggtttcacaatcatgttttcaaatcttccatttttaagttccttctaaaacagcaactgaatgatgctggttactaccacagttaatgtcatcggagggcatcacggtgaaaaagatcaaaggacgtttacctgaaagcctttcactcttctgatgaacrtggtttccaagtatcacattctcagaacttgttgaatgtggaaagatccaaaataaggccctatacaattaagccctcataaagcagagggaagtcctacaattcacccaccgttgcgttttgtagaacgttaacacacctgctgttatggggtgcgttgtggtttccccaaaaattcacaccgaagccctaacccacagtacctcagaatgtgaccgcatttgtagctaaggcctttgaaaagagaacttaaggccggtygtagagactcacgcctgtaatcccagcactctgggaggccgaggcaggtggatcacgaggtcaggagatcgagmccatcctggctaacatagtgaaaccccatctctactaaaaatacaaaaaattagggaagcgtggtggcacatgtccgtagtcccagctactcgggaggctgaggcaggagaatagcttgaacccaggaggcagaaggtgcrgtgatctgagatcaygccactgcactccagcctggacagcagagtgagactctgtctcaaaagaagaaaamaaagaaagagagaacttaaaatgaaaccattacggtgggtcccaatctggtctggctgatgttcttatacgtggaggagattaggacacacaaaggcataccaggaaggtgcacacacggtgaagaccatctgcaagccaaggggagagagaggcctcaggagaaaccaaacctgcccatgccttgatcttggactttcagtttctagaactgtaagaaaaatttctgctgtttaagccacccaactcacggttatggcaaccccaccaaactgatacacctacattttaaaatacatcagatagctttaggtacagaacaacagtaagagcagaacccctaagtcagatggggttgatcttaaatctagtctgctcgttactggctctgggactcttagtatggcactgagtggtccatgaagtggggaataataattgtacttacctcgtagagttattggggagatgaagtgaatgaatggaaataattattgcctaagtgtttgttgttattctaatcattataattggatgttgcattctggttgtcatagtttcactgctcacatatgcctaatgcacctgaggaaccagggtgacctagcatatcggttcacgccaggtgtggtcttaagaatcataaacaaagataagacgttaaagactgttgtctggtttctctgttgttttcaatggctccttctacaagagcatggctttgaattagctgctggacttttgaagttgaacatgatttatcctgagttttcttttaggattggtcagtgtccatatgtgtaaawgtccatatgcatttggaagcactgagagattaacctcagcagttacaggcacaagaaagaacaaccgcctctatagcactgtgtgtgaccactaacctcagaaagaaccagcattataacaatgtggatagcattctatcatatctttaatttcttyttcctgctagaatgaattgaggatggaaatagccctcacaaaccagagggcagtattgctgtgcaccgactgttacgttttgtggaacattacggcagtatgcttgcattataaaatttaacaaattcctagcaaaatgtcactattcactgtgtgaatgcaatctcttyagtgcatttaagttggttaccttcacacatcaagttctagcagataaaagtgggcacttaatattcagtggatgtgctgagaatagccctgtttatatacttgatttcctaaaatcgcataactttttgttatcttgtaatgcgtaaaagggacagtgggatcagagaaagctgtttactatgtcagataaacaagtcagaaggttccatgtaaactacttatgccctgcctggcatcagaaagcttgggctgagttctttacatatttctccagaacatctctgatttaaaaaaatgctaccaagcccactgtttacagacaaaatttttctactatctgtaaacattactggctttcttgagtgatttcttgtctttctcattctcaccyccttgttctgtttctccatatgggattgtttctctttcaggtgtcctttctcagtcagaggctagctctgtttgtcttttttatttttccccctaaatttgtgaacaagtcctagtgtccatgaaagtggagaactaatgggattgcctggaggcagtcatatatactttagacaggtgctgcgcaaacttctgctgtcagctggccgagccctcttcaattccagcttgtaaacaccgatggcagcccagccagcacagatgcagccagctactgattattccattgacagacgcagctggttgaccgtgcttcctgaattcattggtgttctgttcaaaatccacctgtttattgaacaccctatgtttgcctaaattcaacatttggttctgcagaatggtgaaactgggcatgtgtgagayggtaattgcttgcgaaaaaggcaatggaaagtagtaaatgaagcatgtgaaaagcagctttattgaatggtctattgtgttaagtacttgctttcgttttacacatatgacccaatgcctgcctagaagtattcatatatgaaatattaggcagaaatataggataaatccattcatacttctggaaacacagctgatcattagtgatggaagaaaaaggttttagaagggcataggctttgattgtaaccaaaaattagagttggctgtagaaatgtacagaatctccaccctaaccctccttcctgggctccagatggacagggcagactcctgctggtgatctctagttagatgaaactcaccatgcctttccaagcgtgctctcctccaggtgttcctccttatccattctccatttcagttgatccagagacttggaaatcacccatgatctccctgtttctcatcctcacattcaaattttttcagttctgcctcctaagtattttccagatcaatccatttgtttccatcctggaggcacatgtcttccctggaggggagaaagcaaggtagggaggtagggagagagggaaggggagagaattctttttccttcttttaaattttattttccattaaaaaaacataaaatttatcatttgatattgtttggctgtgtccccacccaaatctcacgtgttgtgggagggatacagtgggaggtaattgaatcatgggggcaggtctttcccaagctgttctcatgatggtgggtgagtctcataagatctgatggttttgtaagggggagtttccctgcacaaactctctctttgcctgctgccatccatgtaagaagtgacttgctcctccttgtcttctgccatgattgtgaggcctccccagccatgtggaactgtaagtccattaaacctctttcttttgtaaattgcccagtctcaggtatgtctttatcatacctgagaataatacatcattttaaccattttaagttaatggaataatacatcattttaaccattttaagtgtacagttctgtagtgttaaacatactcacattactgtgcaacagatcttcagaactcactcatcttacgaaactgaaactgtatacccattaagcaacaactccccatctttgkttctttctttcttttttttgctgttttttatgatggccaatatggacaagcaaaagaaggtacgtaagactttgggtcaaaataacttcaattgatcagtgtttattttgaaattcttaaatgatgagttttaagcacgattattagttgttggctctgggcttttctttcatgagctcattgtgctcacagggcttggcatggggacactttccagtgtctccccaggtttcttgcactgccttaatttcaacaatcagaaaagagggtaaggtgacctaagatagacacttctgtttggttttgatgattcctcatttagaagaaagcttgtaacagtggaatgaggtatacaatctakatttgagtctcattttcatcatttakttaattgtgaccatgtgcaagcaaaatcctgtatcatatgagctcttgagttttgtctggtagatcaatttctacaggcctttaccatgatatcattgttgttctttctcctcctcttccttcttctcttcctgtaccgtcatcacttaccctgttaaaacacttaaccaaggagtgctgggagtagaaaagggaatgagggacacgatttgctttgcaacattgtgaggaagccttaccctgggcactcatgctgaaaatgcrttgagtgatgttacagggggttctgcatgctttgggagtgctctgttctacttagaagtttgaagacgttgcctcacaactttctatattactaatgggtaacggttaatcaaggagttaaaacttttgagtcttaattcacaaaagacagttcatctatcaagatatatttgttcttttataattaagatctgtcacgtctttctactrtattcagcaaacccatgttttcctgattttagggttttacttggctgtaaaatttcctctgagctgcaaagccacacatgtaatctgcttaggaatgaacttttcagcagaagtcaaaggcaaaaaatcaatttagctggttttgacttacaacatttaaaagaaaaatggaaagtattggattttggataagtacttttgctttaacagttttagggtcgagtagatgttcaaatatcactcaccacgttggcctgtcgtttggattattctgttttattattttgaagacataaagtcaacctagtaattaagtaggctgccactgtctgatgtttcatataaagaaacattaggctcttcagcacatcaaatactaatcagctgggtcggacttttttgcttaatatgttatgtcactgatggagatgtgagaaaaagccataactgtctaatcagtgggaggtttattgcattagtcatagattttggggggagaaaatagatattttatctatctatctatctrtctatcbatctataacatgcacagwatatgtgtacacatatactgggcagttgtcataagtgctcaggttcaaaaggttgaaagagacactattgtgtaaggctcaagagcatggggttgattttctagacaccttgatttcagatttaacctttactctgtattagctggtagctttagcaagacatgtaatctctccatctgtaaaatggagctagtaatatcagtctcaccttgtgaaaatggcataaaattatcatggtaagtgcctggcacggtgctagaaaaaaagtrcagttygtagaaaataggaggtattgttacttattatctccaaccaggcaagaagaatagtttgtcatcattattggttcacacagaattatattaaaagwattatcatgggtttaatgtcccaaagaattggcaaaagcagactggccacttccatgctaacttaggtgatgtcaccgttgttgtgggttgatgagttgggtgctgtgcagctgttggtgttgctgcttttaactgtccagctgtcaatgcaagggagaatgaagtagaagcccaaagtccttcacagcttgattagtactctagccagtccactttcccccasgttgaaaaggctggcataaaaggagagggtaaattcatgagcatagaggctccatgtttttttccctctgttgcccagtgccatgcataatgccttgccacagtagacacttcatcaaggtaacaaacagccagggaaataggtggcaatggtacctttcctctttgaaatatgtgacaatggtacctttccrctttggggcattagacattatcccagccactagcytttaaagtttttatgtttggttacttaattttttgaacattaatatcttttttttttactcatctctgttatgggttgaattgtatcccttgcaaagaaagataagttgaagtcctaatccctagtgcctctgaatgtgagtgtatctggagacggcctttacagaggtaatcaggttaagatgaggtcactggggtgggccctagtgcaatatgacttgtattcttaaagaaagggaaatttagacatagcaacagacaagcaaagagggaagacagtgtgaggaaatccatcaagaagacagccatccacaagccaaggagagagtcctggaacacatcctccttcacagtcctcagaaggaaccaaccctggtgacccattggtttaggcccctgtcctcagaactgtgggatcgtacatgtctcttttctaagccagccagtttgtggtacttggtattttgttatgctcgtcctagcaaactaatagagtcctacaaaggatatatcgatggtaggactatggaggaaagaaaaaagtaagatacttcaggttacattttccattcaaaatgctttttcagtgtagtgtgctttttccaagctcagaaactgaggagaacagggagctgcttctaataaatttcyaatgccttttcctgggggattgattgaacacaaagagctcagagctatcttccagccatctgcaagagatgygtttttgtacacctttggtaacatctaagtaggccggcacaaaagggccttcgtctgagagtgttctgtggaaaggcggccatgattgcagaagcatgtaaataaggagtattatttttttattgtatacttctttaaaatgtggatttttccaaaaagctaaacaaagtatatatttcagaaatgagaataagaattagaagggataaattgagatattcatggaaacatgattttttaaatagatttttggtaataatgggtaaacctccttatttcctaatctgcccttctcttgacctttgtcccaaaacaaatgcattgtggaaagattaaaagaggcaatttcatgtatgaaggtatgacagaaaacaacagaaatccaagtttcttttgtgggtgtcctgagtggtctcaggtagcatcttctccccatgacagctttgtgaacatttcttctccttctttattcagatcatctctgggttgacagaagtggggtcccatagactaattgagatgccgccattaataaagaccatatgttgcaggcatgttctgatcctgtgctccttgttttctccactggcctaatggtaaacaagtgtgtggctaattaacttagcatttcttcgaaaggcttcattccaaccttggcggtaattattattcagggcattgctatactttgacattttcctgaagtgtaaattattgctgtctgaaagaagtcattggctcaagaaaaaaacataaaagacaaactaaaaggaggatgaaggtacttctgagttggtttcctctcctcaaaggtcattatcaaggcagcaaatgctccctggacatgttgaaaatgccccctgtgcaagtgagastctgaggagcagttggatctgcaagtctccttctgtcgggtcatgtcaggatcatagggtaggttgctaataggatggcttcagggttggaggtgggagatgtaaaaatatttcatgcacaggtacttcttgttttattacttaattttaaatgcatcagtagcttttttttattgagaaaagtccttcagagagatgttttggatacatatctgacacctgtggtttatctcctttgtaaacccccctttctagcttttaggggagcaacaggtttgctattgtgaggtcctaataaatcttgaggccccaggtggtttacccccacctagagttgccttcaagaagtatagatcagccaccccatgttaattaaaaggaaatccagtcttgaatctctcaaagaaacagaaatcatgtcattcccctcagcagtatttctcccctacatgttggtgccctggagtcactccaggaccagctccccagtctctccttctagttcttacatggtccaacttttctttgtgttcgcttcctctcccctagtcctaaatctttatgatacaggcttagcctccgcagttctcttgaagccctccgaaccaatttcacagattctgaagcatgagagagccagaaccaggcttgggagaagggaatagagaaaaggtaagtgtgaggaggacaggggagattcacaaatgaatgtattatggctctgtttcaccccctactaattatcactgagttatggtatgaagaaaggaaggtcaagaaagaaggaaaggccaggcgcggtggctcatgcctgtaatcccagcactttgggaggccgaggtgggtggatcaccaggtcaagagatcgagaccatcctgaccaacatggtgaaaccccgtctctactaaaaatagaaaaattagctgggcatggtggtacatgcctgtaatcccagctactcrggaggctgaagcaggagaattgcttgagcctgggaggcggaggttgcagtgagccgagatcacatcattgtactccagcctggagacagagcaagactctgtctcaaaaaaataaataaataaataaaaagaaagaaggaaattattcattaggtgacatcaattttttgacactatctttgttggacatgtttatgggtgtcatcttaagataaacatttgtttggtgattgattattgtaggcatttggctcattattgtatttccataccatatcatacctggcatatatttggctctccataaatattttatgactgaattaaagaatggtggatcagtgactcttcagtgtaaatttgtgaactcataatttcttccatttcacagatgaggacatttagactctgacaggttaattactttgccaaagttaagatggctcagaaatgacagcattaatgttttcaactcaatacatttggttctragatcttccattggactgcactgcctgagatactatcttccaccatcatcttcccagtgtgaaagtattgaattcaccatgtgaacactttataggactattttttgcttttgctgttattacattatttctattataacagtatagaaaaataagagaaattgaaaataagatatttagtgcatctttatacatacaatcttagtgataatccagctctcaattatctgtaccttaattaggtgctgttttgattatctgcattctccaaggactctcttgcccatcacctaagcagccttcccctcagcagtatttttccatcacctagctttgttgaagtttggggcattagacttcatcccagccactagcttttaaactttttatgtttggttactttgacagcctttggtcaacatgctcttatgccaaagccccatgtatgaaacagataaaagtggagctgctcagatgatgggagaagtaaggccaaatgagttttaagactaggtccttaaaggaactttggcttttcttggttttctttctagcttgagatatatgtcttgggaacctcaaggcaatatatgataagtctggctaccttgaagccaccgtrtgggagagagcacatggaaacaccttaaggagccagagagggatgcccctaactattcaaatcctagcttaggtttcaggcatacatatagaagccactgagatggccctagtctcagccacggtatgactggagtgtcatgaaagttcagagccagaccttctgactgagatgatccaaaattcctgaccaccccctccagaaaccataagaggcagtacataatgaccgttatttaagtcacttagttttagggtagtttgttacacagcattagacaatcggaactgtaggcattgtatgtgtcttattttttgtgtagaaatttgattgttgttcagttttggctttgtgatctttgtttcgcaccatggtagctgtttcttaatgaatgttaattttcttttcatgttgctttcttctgctctattggaatattctgatataaattcttttatcagtagcgagcaactttttcagcttaaaaatgtatccctttcatttgtcaccaaaatttctcccttaggaatagttcgagcagcattccaggtgtttaatgttttgtaccttaatgaaggcacaactcatgaaaacaactattgaactatcaagcgtttcatgcatattgagacagtattaaagttaaagacaaaygtacaagcaactgtctgcagttatacctgaaaatattatttaagggcacttgttttattctgacaaatttttcagagaatatttagacttgaggtaggtgttatcagactcttagataaaatatataayattattcctaatatartaggcttggcagatttcatatgaattacagcagtggttaacattygtaaatagtcacattttattcccactatagtctgttgaatcaagtaagaaagatttgattcagatcaataactatagcacataaaataataaaccctttcaaaaatgtaagagtataaattatgtgtacatgtggcagtggttaggaaactgaacataaaattttaaaatatagcttgaaaacctactaatctatcagctattaaaatagaaaatagacaaaaagtcattactctgaaatttaataacattgaaaggtgtttgggtgtttatttattctcagtatagaagtagctctgaggcaaggtacagtgcctcacacctgtaatcccaacactttgggaggccgaggcgggcagattgcctgagctcaggagttcaagaccagcctgggcaatacaatgaaaccctgtctctactaaaatacaaaaaattagccgggcatggcagtatgcacctgtagtcccagctacttgggaggctgaggcgggagaattgcttgaacccgggaggcagaggttgcagtgagccgagatcatgtcactgcactccagcctgggtgacagagcaagactccatctcaaaaaaaaaaaagtagttctgagtacaaattttaagacttacttggttttaggccgggtgcagtggctcatgcctgtaatcccagcactttgagaggccaagtcgggcggatcacctgaggttaggagttcgagaccaggctggccatcatggtgaaaccctgtctctactaaaaatacaaaaattagccagtgcggtggtgcgtgcctgtagtcccagctactcaggaggctgaagcatgagaattgcttgaacctgggaggcggaggttgcagtgagccaagatttcgccactgcactcgggcgacagagcaagactccgtctcaaaaaaaaaaaaaaagaaagacttggttttaagtaagctgagtgggttaaatggccatctagattgtttatcaactctggtgagacttcctagtgcctatttggcagtatggaaaacatttttttgaagcattrtgtatgtattttctaccttgttttagaaaaggttcaactcagactacacaaataaaaagagtgcatgataaaatgaaaagaattggatgagctaaatggagcaaaataataatcagataaattcacgaatgaggttaaaacttcaatgttggttgttagctcttgttaatgatgtcttaacgtcggaccgtgacaaggtgacgttggtctacgatgttccccagaactgtccaagatttagcacacacttctccttttcttccttcttctcatgttggaagtcaatctcctttcactagaggcaatttcttccagtgttgagccaaggagaggaagtagtggtgaagactacactgatatttcctaatgatggtgactgtattaaacagcttagaagctttaaattaacggarattttattgcagaaaataagtctcagtattaggatatggcccaatgtgtctctatcttggggaagagcaaaaacaaacaaacaaacaaacaaaacctgttgactgggcagttacytctgttctatttagaattctctctttgtatgcaccctgaatacagctatgtaaaggaaatggatgccctttgaataggaccaggaggaaaagaaatgaaaacatttgttggtttagggtggcgggactatgggctcatttttatttcatctttatgatcattttaatattgttttaagtatctttatgatataaataagaaaaaataaagttttattgcttaccacgtattactagcctccagggtattcgaagtctttggagatgaaactctcattatacagacagccttgttcaatcattcaagcartatttatctagcaaggcattatgggaaacacggaattccaatagagacacggttctcagagagtcaygagagtcttatgaggtaaaataacatgctctgtatattaaccatatgaacggtttccttttagcaggaaggactgtggttttcttttaggaggaggtggaatctaacttagatctggaaaaattatcagatttgggacacatggagatagggagtcattgatggtattgaccaaatatttttagttcttctttcttccaggtgtatggtagcattatgcttcttgtggtttggtggaaccacatgactagttatggcagtgaattgtgtcactttggactaagcacctaacttctggtgtaagaccctgcagttttctcttccccttgggatggttcctaacagtrtttgagctggtttttgctctcttagcctggatatcagagtgccagagatgggcagagctgatctgctggcccaccatggacaaatagcaggcaagaagtaaaccttttttgttacaagcttctgaaatgctgggactgcttgttatcatagcaacacctagcttaacctattgatagaaagtcaaaagatattcagagtagaagacaatattaactaagrcatatgaggaaatacatagcaaaaagttaattttggttggaaccttgaagtgctggcragmatagtgagaaacaaaattggaaggacagttgggacccatcctagcaagcctggactttgggctaatggtgaaaatagaataatctgttgaggtgtggctgaatcttgtccttaattcattgcatgattccatgttctacccccaaactgaaagtttgcaaaacttatatttaagggagggacctccctataaaattttgaccagtataaaaaaatgtttttggctgggtgtggtggctcacgcctgtaatcccaacactttgggaggccaaggcaaggagttcgagactagcctggccaacaaggtgaaacctcttctctactaaaaatacaaaaaattagctgggcatggtggcaggcacctgtaatcccagctactcgggaggctgaggcaggaaaattgcttgaacccaggaggcaggggttgcagtgagcagagactgtgccattgcactccagcctgggcaacaagagcgatctttttgctgcatggtggccattctgtgaaacccacgtggcggtctgactctcttttctcacctctggaccttggtatccttctaggacctagtgcactatctgatgtatactcatcgctaagctcatttttactgggctgaggagactctccccgtcataagcagatggcttgatcctctgactcaggtttatatattcagtgctctgtgttatctttttatccagagcatgatgaaaatgagttaaggtttataaaatgtttaaagaggcattgggaaaaatatctcctgtatgaatgagatagtgataataataaaattagaaccraatcagagattggtgaaggaaatttagtttaatttgcatcaaacaaactcaatgctgtgaatggctggtaaagtgaaatcttatttctgaagttcttgaacattcccatttctaacatttctaaccagggctttaatatcattctaatgcagttttttacatgtaaattaatataataaatgtcaatgttgaatagaataaggtcacattttactactttgaccagaagtgtaatcttcaaagattcaattttattaccattataacagtcatactggataaggtcaccaatatttctttccaaatgatataatatatgatgacagcctttataccaactttagtttgtgtaatctggatttatattctgaaacatgttgacgaagatataccacggacatttcttggtcaaatggctgcctagggaagatgttcccctctaattgatgggaaatttgaaagtgggtaaatggagtagtttaaatgtagcattttcttgatcatatcatcttcttgcctacagataattaaattcctgtgacgttttagtctcctacttgaaagggaaaggtggtgtttaaagacctttyagtaagtaaaagcaagaattgccctgtatgtgtgtgtgagccagccagctggccaacctgcacaattcatytgaatgacatgttcattgaatcagaggagttcagggttatcagggatgttaaagggcaactagcaaagccattyaccttgaccctcttctgcagcatcctcaccaagtgatcaatctctgctccagcagggacagttagagtacctamcttatgaaattgttgtgaagattgagtgaggggttatatggaaagtgcttagaaccacatctgccccattataagtactcaatcatgtaagtcactgctgttattgttatcttgaatatgctgttggctactccctcacgagacggtgtattttcatcttcccagagcctgttcttagatgaagctgaaagctacctctttgtattttttactgattgatcttagttttgacttttgagaacataaatgataatgttgatgatgctaatacttgctaattaacatttactgaatgtttactgtgtgttggtcactgtacccaatgcattatcccatttaaaattaattttgaaatgtttcagacatactcagaaaaagcaccaaaaacaatacaaaggatggcctgtttaccttcaaccagattcaaatgtcattcggattttgccacacttgcttcatttatccacttgagtttttgctgaaatattttaaggcaattgctagaagtattttyttagctctacacacatcagcatgtatctttaaagactacgaaaattccctaattggcaatattattatcatatttctttttctttctttcttttctttctttctctcttttttttttgggatggagtttcgttcttgttgcctaggctggagtgcaatggcgcgatcttggctcaccgcagcctctgcctcccaggttcaagcgattctcctgcctcaacctcctgagtagctgagattacaggcatgcgccaccacgccyggctgatttgtatttttagtagagacggggtttctccatgttggtcaggcttgtcttgaactcctggcctcaggtgatccccccgcctcagcctctcaaagtgctcattacaggcatgagccactgcacctggccccattatcatatttcacaaaattaatrggaatttcttaatgcagtagtcaagttctttgactgttttaaaatgtctttttatcattgcttggttggatcaggatccaaaaaagatccacaccttatattaggttattatttgttttagtgctgttttaatccaatattgttatgccattgaatttttttttaactgagtcagttgtcctgtagactgttctatagtacggatttgtctgtttgcttccctttagtgttacttaacttgtttctctatcttgtgtttggtgtaaagtaagttagctctaaggtgggctccagggtagatgctagctataggtggctgattatacacttaagtaaaattagaaattcaggttgcttctttgctctagccacatttcaaatgcagctagtgtctgcatagtgtaaacaatcgcaaaaagttctattagacagctgcgggtctatggattattttcagatataagcatttgtagtagtagtattatgtgcttcaaatcacagtgtatagggaggcataatgtctggatgtcctgctcttagaatcctgaaattgatcagcagatttaggtagtgacagcctggttctccattataaagtttcccgtcacactttcatccaaagcaggagttcttaacctttttggttcagtcacctttttggctgttggtgacgcttgtataccttttcccccaataatgtttttattttttatttttattattttttttcaaggtacggtcttgctccttcacctaggctggagtgcagtagtatgatcatagcttactgcaactttgaactcctaggctcaagcagtcctcccatctcagtctcctgagtmgctgagascacacgtgcacgccactatgcccagctaattttttttagatatggggtctcactactttgcccaggctggattgaaactcctagcctcragcaaccctcccacccaataatgattttaattaaggacagttaagtatagagaagtaccaaggaaattcatgttatktaataccagttaasacagtattaacagcaaatttgtgatacagtgaattatgcatttctttattacatattaaataatgagaagtggtagcagctataatgaccatcataattgtgtgatagtaattgtaatgataagtacttctagaataaatgatatttcaaggtaactgcaataactatcaagttattactttacatatttttwaaatacctgtgatttatactgtgacacaactcataggtactgctgttactacagtggttcattgcctacatctgtgatttaataagatacaaaattttagttaaaaattagtaaaaataactrtgtgtcatttttttcattcatgttcatgtgtttccttccttttatccatgcaccctctgctaagcctctgtgggacccccaggttaagaactcctgacctaagccccaaattacctgttgataattttgcatgagtcagttatatttttagggatttaaaatggtgggggtccttttgcttttaatgctagaattctttgaagaattgtccatcattggtgctgtttggttactctgaaatgcagttccatgagaataaataagccccattttgcaggtgaggttactgataagagtttatttgcccagagtcaaatggctaaaaagtggcaaaaatggaattggaatccagatctgagtcactccacaggtcatatgctggattcagattctgttctaccatttactagttggttcacstgcatctttcctccttcctagaatgactgcctttgcaatgctatagtcaaaggttgacccttgtttcctcatttctcttttctttgattttcttcagccatactgatctcttttgtgaatgtgctataggctgttcctggtggctcccaggttgacagaaaactccatgactatccctgtcaataagatcagagtgagaaatcacctccctcaactcaacaccagacttgcattcacaatctgagataaaacgtgttttgtagaaacaacatttctctgttgactcwtcttgagcttattctctacaaaaatttccaagctgttttcacacatgctgctgcaaagtgaaacttctccatcttgtagttsagcaaatagtggactggaccaggggagatcacccattggaagaattctcatttttagatttatctgaggacataacttgggaaaaggaagacaacccagagaatgttatgtttatggttataaaacattaagaaaataacagttattttttctactctctacttactaaaataatagttttagcttttatttatttatttttatttattaatgaaacagtaattcattcaacagtcattcgttctaatagtcattcccttagacattttttcaaaccacccacccagtcatctaccatccgtccatgcatcccagccatccatccatccattgacccaccaattcagtgtttagcaagtgctctatgggcagtatactgtatccaggtagaatacagctgagaagcagacattcctgatttctgccctcatttcagtttgcattctcaatagaaawcaagtaatcataaatgagtactaaaatttcaagattgatataagctatgagggatacaaacaaatgggaagaaaaggaaggagggataccttcatgggatgggattgataagtctactaagaggtgacatctgtcctaacctgggctccatatgctggtctttggatccaaggatgaaaaataagtggcctctgtttttaaagagcttctggaccagcggcagataatgcactacagaaagggcctatagtggaacattgtgaaggaaaacatacagctatagctgcattctgttttttgtgtcaaaataaggattttggcaggaattttgcttgttgcgcattatccatatggaatatagaacatgcatggtattgatgttactcattatgtaatctcccttcagtcatattgtgatgtacaagagaacatttggtggggaaaccttaatgctaacagccaggtttaatgatgcattcagagttcaggaggtttgataatataaaagttgtcagaatcaaatggagtcacaaacaaaaccctgacaaatagagctaggaaaggccatgacgggagcgttctcatgtacaaatgcctgataacaaaaactatcataaaagactctgcaaaaagccacgctgcaccaaggccatcacatctgtacacacacacacacacacacacacacacacacacacacagacacacacacacacacacacaatgcttctatgaggacatctgcccaacaactgcctgtccaacctctttctggtgctacaatgttattgatcctagtaaccaaggataattacctcaaaacaattaggtaattctcctcacttgccctttaaaaacctttgtcttccttcacctggctgaatactcataatttactgtggcacatgtattcccaagacaaggcccatttctcaataaatatcattttcttttagagagcctctgttatttaggtagacagtaacatgcagttctcaggctacttgggaaacaaaagagaactttgactttaattttgccaggcagtgtggtgggagaattcaggagcatatgacgacgggtctgctctttctggagagagactgcatatatatgtctttttaaagtcacagtccttgattttccttcatctgctctctcctaatattaagatgcacatcacatatgacactagttcttggcacaggttttaaatttgtggcctgttacctatatgttttatttgccccacccaatattttttaacacattggaagtacaagtacccctcatcttatacagcagtgtgggactataaaaatgaccacgcaagcggaaaccatgcawtgtccacttagtaatcaatgggaaaacgtatgactgttctatgacctttaacgtttttctctaatcattaaaaaccctctataagttatcagagtataaagaaatagaaaaatataatgaaagaagtaaaaaacgaactaatrctaatttagtacactgtaatttaaaacattagaaacactaagaattgaagtgctttatttctttgaaaatcacttattgagagtctcttgaacaattcttgccttgtttttcttatcctgcaactaacagtacagatggggcatcttttctgtgctttggctgattgtcataatccctcctaaagtgtggatctccttccaatatttcatcctttgtgttttcaatgtcatgaaataggacgttttttaaaatgtgacttttttgatgtcacttcctctggtacatctttttcttctgcatcataaattctttggtaatttatgttaataagtttgtctttactaaattccttgggttacatatctagaatctcctgaacatcagcgcaattggcattcccaaagtcagttatttgttctataattttatttacatttgattcaaagtgcacttctggggttgtcacatttggttttttgtttttgtttttggtcacttgtgtttcatatttcttggccagttccctctttcgattatccattttggtgaaatatgtgggttcatcactggaagatcagtgggatacaaaactacatactttgctggctgcctctgactgaataccagatgtgcagtgatcagtcactgacagactttggaagaagtgatgtgactggtctctgatcatcatgcacatctatgatctacatggtaatttgtgaattgaagagctagtagtggagcttgtactttacccaatgacccagagttaatgtgacatggtaactgaaatttaaaccrtgttgttggggaattggtgttgtttaaactggagtaactgaaatatgtgcatattggaaccatgagaaggactgcctatagttgccaaaagttaaatagaagagaattacacatagcaattcaaatttctagtttcttcaggaacaaaaaaatctctaggtggtggccacccaccttggggcatgtgttttccagttgtgccagttccaccactccttgttaccataaatttgtggcctctcctgatgaactgtacaatgtaatagctactagctacaagtgattactagctacagggtggtatttaaaatgtaaagtttaaatttartttttaaatgtaaaattaaaattaaaacaaaatgcaattaaatatggttgattacatcagccatatttcaagtgctcagtagccacatatggctagtggctactatattgaacagtataggatatagaaagttccactagacagcactgctctataggcagtgatctatgttagctaaattatgatggatcgaggaatatcaataacactgaaaatccaaaatactatccttcaatctgaattattcttttttttttttttataaactaaatggaaccagaagagattctgagttaagagtacgttttcagggagaacgcttgtggttttttttccttatagaaacattaaaggtgttggaatctgaactctatggcgtagtattcgaggttgcagtctcgcggaggagcatttaatcagtaagaaacttgtgacacttattttagctgtggttatttaagcagtttctattttcttttaagtgatgatggtaaagacagtgacaatggkgatgttggtaatgagagattatggggccgmtgtctgattccccatgacagaagactgttggttgtcaaagacatgtttttaatatctaagcatataaagaaaatgagagtgaattttaggattcttcaggaggaataacamtatacaaatgtgaaactgttgcagaattgccagaacatttgttttgtttccacagttttctttttccttaggcatgcttaaatattttttttcagttatatacaaaatgaaattcaaatatatagaaatcttgtaagttcatatttttatagatctttgtggattattgggtttactaattttttgtgtgtgtgtgtgtgtgtgtgtgtgtgtgtgtgtgtctgtgtgtgaaacagtcttactcactctgtcacccaggctagagtgcagtggcgttatcttggctcactgcaagctctgcttcctgggttcaagaaattctcctgcctcagctttccgagtagctgggattacaggtgtgtgccaccatgcctagctgatttttgtatttttagtagagacaggattgcaccatgttggctagactgctctcaaactcctgatctcaagtgacccacccaccttggcctcccaaagtgctgggattacaggcgtgagccaccacacctggccagatctactaatttaaacattaggtaaaccatatagtgttctgtgctgtctaaacatagcttgaaaaatgacattagagtgaaaaaaacttgcaaattctaaatgcgtttaaatatttacaatatttttccattgtttgttttcacattttgagattttttttattgttagcaaccatattttgaaaaagtcgtaagttagaactggagaggaagactaaatgattataagatgattaattcctagactctgctaccagtgatgcttacattatgagggggaaataaaaaacagagatcaaatgagaaaatggagatgggtgggtgagtggaatgtagaaaagtacagacattttaaacatgagatgaatgaagatctgggttccaaacgataacactggtgctagtgagacactgtttcaatcacataaccgcattaccattgctggattgagggaagctttgaaggatttcatttccattgactatttttttttttttctaaaccaaccattygttcagcttttatttgttggkgtgaaatatgctattattttgaaaaaacacttttaacatcccaatgaagtaggtrcasatattaactccamtttaggaagaggacagtaggctaggagatttgaagaagaaagagtagacaggagttttttgtttgaaaccctggatttgtgaatgtatttctttgactgtttttaaaatgccccagcctcccctgtgattggcagttgattttattaggagacaggtgtaagcagatggaaagaacttttctttcccccyctttacaggccttggaggtttagtgataaatgctgagctatatttgcatacaaatcactatcttgaaaaagtttgctttcttgacactctggcagtacagttcattgctgagtagcagttgttgtttttaatgaattgctgctttgtttttagaggctgcctgattaacttactctattctggaagctgccacagtgacattaaaatgtcttttgcttcctgttttggaaacatttggaaatcacttgctgctgaaagttttcactctctctttttttttttttttctggtagaattttctgcatttttattgttgtaaatgattkagcttattctttaattttgaatggatcacacaatcatctttatgtgtccagctgcctttgttggaggagacatgtcttaaattgttcactgctgaatcagattaaaatgacttcggtgttatggcattaaaaaatcttttgtttgtcttttatggaggcttcatgcttgtgaattatrgcacattgctcagacagagtgaacttcttttcttactctttagtactgggtatattagattctaagccaaagtgagcaaaagtctgagcctgtttctaatcattctcttggggactaatcttcaaagaattcttctgatttaaatctagatttcttatcttagttggggtcaggagactatttaagaattttataccagaggaaaacaatgtgtgtgcgtgcacatatgcaccattttgcaaacaatttcaggagattcatagaagccctggagcctatctgtagacccaggttaggaaactctgctctagttatttctggagaattctataaattcaagaaagaaaagtctccaaatggtgagctacatgacactgtcccacccaccgtatctcaaaattacatcactcttcacctactacccaagccagaaccttggaatcctctttgatccttctcttcctttttgccccmattagttaagtcttgttgctcctacctcaaacatacatctcaaattctctgcatctctactgccaccaccacaggccaggcctgctttgaatcttttacctagtctgcaataaagatattcccagtggccttcagctttgcaaagagaacccagaatctgtcatacatctccactctccgaaatgcttcagtggcttctccatgcatggcgaataaatmcagactgctgaccaaggctatcaagggcctgcactctttcctgaagatccagttagaccaagtgaactgggcctagttcacagccaccttagctggtttggcttgttacggtcttgcccttgcattcttgcaccttttctttctcatctcaccccttatattttcacagtagttactatgtcagttgcctttgtctgctcaccctctagatttcacatcttkggaagggagaggatgactgtacctggttgtgctgtatcctcagtgtcttatatagtacttgccaggtagtcggctcttaattcacaaatatttactgaatgaatatacaaaaaaatacagagttcttgaaagtcttttggctttatccttttctctaatattcaactttgtgatctttcactaattcattcagaagttcattcactgaacacatgatgaatacctctcactacgaaatcttcacatttattttaggttgctagctcatggaggactgattttaagagagaaagacgttgattcatattctgtgagaatgccaaattagtgttaagtgtgactctctttcatttatttgaaataaaggatgtttctattaacattagtatctgtcatagaagagggttcctcattgttattaaaaagcatagaacactgttatctttgaacttttccaagcttcactgagttaatagttctgaagttttccatttaaaacacatgcactacttttgatgtgtgaaggaaagaccagtttgtatttatttttctatccctttagctgggtatgttacatttgtattaggaattcataattctttttttttttaccatgaagtatatttttcttaatggtttacatttaagtaagttgagtctggactggttcactggtcttttaagaacccacagtttggggagcattttgaagaaattattcattagaaagaattgtttcccagattaaacaatgaataagcctacatgacatttattttttcaccaagtatttattaaaggccaatgctatgttaagctctgtgtgtagcaccaggaatcctagttgagcctatctataaaggagtatttcctctcttctaaggaggcttcatctgctaaataccacccctacctttaatctcctctctccctttctctcatttcctatttctttcctttcatatttatagtttggctactttttgccttcagatggcatctgaactgtgttgtctggttgctccattggcttggccagctatatggaagatctgagggaaactggaatttttagtctcttaaatgacataagcaaacctaaatttggaatccataayttcaaaacctgatagagcttgcactggaagaatcctrtctatgtgggagtttgggccccaggtttcactctagccaccctayggaggtatgtgctcagggcactcccctcattcacatactggtgaaatgaaactgtgtatatggtgagggtgctattaaattatttatgttgcatgtggttytctagatctgcaatgaattgcagatttttagtattactttctcatctctacttcactaaaaagctttttacagagtttttgaaatgattctcatagcaaagtgtatctgaagtttaaaataatctctcattggagttatctttaaatatttcttcagctgctgagtgcaatttatttcttctattgccatactccttcaagtcttaactcctaagagcatttttacaacatgmtcattttcatattggtgtgttcccattctcatgtttacacattgtggacagactctttcgagtgacagttaattttccttttcagtactctcctaaccagaattatctaaattctagacacttctgtatatctctaggacaataacaataataatagattttcataacggttactgagagacattgcaagtcccagaaatgacttctatatcattaagaatgggggagagagaattcttgaaaaaacatttttattgccgtctaattgaagaatggcaggtacttggtatacacgctaatatttttttcctccctggtggcagccaaaactaataaattcctcagttctttcctcctgctccttatcagagcttcagaatcctcttcaacatgctgctgtaaatagctactacaagttggttggggttagcaaaagaggtaaaacctatttaagaacaaacttgccctagtcactgtgaccacgatgctcagaggcccctgctgacctataattcggggtctcactgccagagcagctaccattgcaaagcattgctgcctgtcttggtgaaggaaataaagctgtcggtcacatactagaagttaagggctttagcccagaagtgacgtatatcattttcgctcacaactctttgacctgtattccttgagcttcacccaactgcaagggtccagaaggcctaccatatgcccagacatggcagtaacctgaactgtttggcaaacagcactaatgactgccatatcccatttgatgtattttaatgctcaacttctcagcatatttcatttcacagaatgctctctttctttgcccatgtgattaataggacatgtactcaactttttgtttgaaaaaacagaaaaattactcaggcctctctgtgttttgggaaatgatgctcaaggtttccaaagaacatcctctgaaacatgtgtcctgtgtagtgttctacaatattactaataattaataatcattattattttgtagataagcaaatttgagcagtgctgcatactatttcttatttttgagaagccagaatgcatagtagtacagtaaatatgctgatgaatactgcggtaaagagagctattttacttcatttcatscagtgtttctcaatcttctttgaccrcacagttttttttctgtataatgtataacagcatcccgtggaagcagggctctgctatcccactctagtaaacactgcagtaggtattatacatggaggtttttataaccttgagaggcattgaaacagcatggacattgtaacagtgttgtagcacatgcccctggctgggattttcacttaatagctacgtgaccttggttatgcagttaaacttttttggcctcaacttctgaatctggacattgggaggtgatattatcctaactcaaagggttattgattatcactagaccatactaggcagcaaacaaatgttatatattgtttctttcctttaatgatatcatttacttctttcccacatacttagtttatatgagcatatttttttccagatatgatgctcttccctcaatcagtataagattactttgcattgaaaagttcacagaaaaatatgtgaaattcaaccaaagaatctgtaccagaatgctatcgggctgcggrctcccctgtcaatttactttctttgaaaggcaactgtttgcttctctcgatgaaagtgattcttacttttgagcatccagatcggtaccggagttttgagggcagctcagggcatgttgcctagacaaggatacctgggttctcttcctccagatgamcaaggtctcatcatatcwctgacccaaagcatatcccagggcaaaacatgagatagtggatatttgtgagatgcttgccttgagaaccagctctgagcagagtgttatcattatcttaatcacactgctctggaatttatcatattctggaaatcacatttgcttaaaattacatctrtgtcatttatggttatggttgatgaatatcccatgaaccctttattgagttactgaaatgagtatgttaatccccaytgaaaaaaggtgtggcccaaacaaagcaagatgcttcttcagaattgtatttattaatatttaagggtgatatttctgcctttctgatatgaaaatccatcaaagtgcttacgttgtgaatagattactttttgagatgccgcctactttgactcaaagctctgtaattgtgctatttaaatcaaataaattgaatattttcttgaaaagtagctgacagtccatcctgctattgttttgtgaagtgacattaagaattattttaaacatttacaaggcctaggagtgtttgttagagcaaataatgaattatacagggtctgctgaggtctgcattgcaagctggaatgttccttgcttatcactaaactacacacagatctgcagtcgagatgaatacagactcttttttattagttcagaagaatgattaattctgtgttgtattatctgatactgccttacttcatattaayatatacacaggctaatcagcctaatcaaaatcagtgatattttgatgatttgctttattttggtgacttctatattctgaatccctagaatagatcagatatagaaaactaaatgggggcgagtctgagcaactccgatcataatattctgctgtcatctttaattaatcatctgaatcagtacatttccatttatctgtcagtgctccatgtttaaatatttcgtatttgtcatggaaatcctcctaaaaatatttttaatcaattattatccttgatgagcaaattttgaacttatcaaatttattttgaataaaaatgtggcaacataatggaaattttatgtagttgggaagattctcccttttgcagcatccccctttgttctgactccaccagtcctttgcagttggttctgtgtttcatgaggcagtgtgggaggccacagaaatggcacatgcatctcatgtcgcgtgcccattctcactggtgttgactgctcagaggttatattggcaagtatttggggacactttggttaaaggagagaattctgtggtcgattattctgccataagtttaccattggaaaatagtggcagatgtgcaatgttttgccatctcagtgtaacagaaagagctttggttggggaagctcaccagttgagctccaatcccaactgtgctcctaactgtgtgactttgaacaagttaagtaacctttctctccctatttttaaaatctgacagtgaaggtattggagtagttgatgtttaagatccatctcggctgggcacggcggctcatgcctgtaaccccagcactttgggaggtgaaggcaggtggatcacctaaggtcgggagtttacgaccagcctgaccaacgtggagaaaccccatctctactaaaaatacaaaattagctgggcatggtggtgcatgcctgtattcccagctacttgggaggctgaggcaggagaatcacttgaacccaggaagcagaggttgcactgagctgagattgtgccattgctctccagcctgggcaacgagagcgaaactccatctcaggaaaaaaaaaaaaaaaaaggagcatctcaactctaaaatgccatcctgtatttactcactaggacagccaagataccttgggcccctgttaatttttaaacatccctggaacttcctagtgtccatatcccttttgactgtcatctttccactcctccttttagaagacagaatatctctaccttgaatctgggttggcttgtgattttctttgaccgatagaatgtgggacaatgtaagccttaagcaaattcagagattctgcatctattgggatggaagagcatgtagagtgaagggcctagtggatgcagctgagcccagactccagcctaccttccatctgaaagcagttgcatgagtgagtccaggtgagaccctcagcaaaaaccatccacagacttatggtagtaaaacctatcaatgttggtttgttgttgttgttgttkttttgagacagagttttgctcttgtagcccaggctggagtgcaatggcgtgaccttggctcactgcaacctccacctcccggattcaagggattcttctgtctctgcctcctgagtagctgggattacagatgcccgccaccatgcccagctgttttttttgtatttttagtagagatggggtttcaccacgttggccaggctggtcttgaactgctgacctcaggtgattcgcgcgctttggcctcccaaagtgctgggattacaggcrtgagccactgcgcccggccgatcaatgttgttttaaggctctatgatttggggtagtttattatgcagcagtagataagtgatatagaaactggaagtcagtggctctcctgactctagaaggtctgagatgatctctgacagttattgctgactatcagctgaggtgccttagttctttcttcatgttgccacttaacaggctagctgggattttttatagcatgttggtctcaggcttccaagagagcaataatcagaggtttcaaggtcacttaaggcctaaccttggaaagtcacacagcaacactgctatagattggatatttgaccctccaaacctcatgttgaaatttgatccctgatgttggcggtagggtctaatgggaagtgtttgggggcagatccttcatgaatcacttgatgtcatctttgtggtaaccagtgagctctctactgctctattagttcccagaagagctggttgttgaaaagggtctggcacctccctcctgtctctcttgcctcctttctcaccatatgatctctgcaaactgttttcccttccacttctgccatgaatggaagcatcttgaggcctccaccaaattcagaagccagcatcgtgcttcttggacagccttcagaactgtgagccagataaacctcttttctttgtaaacgacccagcttcaggtgttcttttataacaacacaaacacaaagtaagayagacactcaaggggaggggaaatagactgcaactcttgatggaaagtgggggaaagccagagagcaaaacagcatgtgtaggatgggagggattcttgtggtcacatttgcaaatagcaaaccacaccagctctaggcacctgactaatgcgaatatgtctttctttcattgtgtgtattctgagttggcagtgtgtcagcaagagttcagcatagggcttggcatgtggtcacaccactttaatgcagcaaaaacacctaaagtgttcatgttcaaaaagagagatagtcagttctgggctggtggtgagcatgaagaggaggagacgaaaagggaaaacaaaaagaaaggattgccaagtttctggtagtctcttgtgatatgaatcatgtgttgtgagaaggtccataattctcagtaattagactgtccaacaagcaatggattcagtgtgtctgacaacctgacccagtgatagaggctgcagtatctaaactttctcaggagtctggcccatgatggagcccaagtcaccttgaagcaacccaaagtcaggatgagaaggggcaaaatgccagctttgtatccctctttacttcctccagttcaggcaagctggtactctcccccctttttgatcttacgattctctgttaggatgaaggcatactcactgcccagtgctgaggcctcctttcattgtgggattgtaggtctcgtctgctttctttttccaaggttaggtgtttcttaagcgttcagcatgtttgcatcatagccttctatttaatgaaaacagtggttcccttctatgaacagagtgactagggaatgcagggcacagttttaataagaggctaggcaaaaatggagtcatgaaagctctaacaagcatgacatcacagcactgtcattaataacatgaactttagaatcggacagacgggttgaattctagttttaatctcattttgagtgtgctggtgtggcaagtttctaattttctataagaaattattgcttataattcatcttcaacatgggaattataatagtattaatagtttatgggtttgttggaaagattgagtaagtaagagtacgtacaaaagtgaaatggtgatttgggccaaaggaggaacgcttaacaactttctttgaagctaaccttaagtttctggaccatttttaaggacagattttggtctaggtgtggagaaattgttctactttaaaaggtgaaatgtaaaatgrgatggaaaagtttatctaacaccctgaggcagaattagatctgacctcccctgtgctcccacagctttctatactgatttctaccaatagcattcatctctctgtgttgtaatgatctgtttacactgcatgacagttgcggacattagaatgtgaactcttcaaggtcagctactctgtcctggtcatcttagcatcctaagttccagcatagaccctggactgagaggagactgcagtgttgggatggatgagtgagtaggttgccagcccaatccactggttaaatcactccccaatttttaaagtccagtttaaatctcatctgctctaagaagtcgcctttggttttcatctactgtgagaaatctccttgtcagctatacaacctaaattataactattgaccttcgcttcctttaaaaaatattattrctaaaaaaactctatactctagattatagggagaagtggtaaccagttccacaagttttcacacatgatatgtactggataaaacatttattcaattcaatatagtaactttaattctttaaaggttatcctacatgttggctaagaaatcttgacagaggagataatcccaagcaaacaggatccagaagtaaatgtgtcttcatagcctatgtataatatggaatttacccattaacaaggcctaagaggctccaaattaaattatattgcatctgtgatattrttttaaaacaattggcatataaaaagtggcattagaattacaaaagctatctgctgttcttctaattaatttgctttccctgagttgtttttctaggagcaacatgcaaacaagcaaaattgacaaacaataagtttttttatggtgttgaaaaaaaacatttttggatgtcattgatattactaaatttacattagatacataggttgtctgatttattccaccagttttcacagtaagccattgttgaagtgaaatgtcttcctcccccaccgagttgctgtgtgtgaacatagcctaacatagcacttatggacttcgttggaagcttgcatggttgtcacccttgctgtggtttggtgaagtcaggcctaagtgagggtgtaattcaaatcagggaggaggaatatggggaagggtcccttttaacacagaaaaagcagcttcgtgggagtggaggctggcaatctgctcaaaggaaatgaaaggaaattcttcatttctaaatggttcattgacccatgataataaagcgggcctgccaaagatggataattatctttttaagtatcagatgccctgtgggtgaacgcctcccttctcctctcttgaaaaatgaactctgattttaaaaatgcttcttttcctagtttaccattgacatgaatttcctgattatgagcaaaattaatcagtttcttctttctcttcccctctctcttatggaaatcaggcctgaccagctgagctcagttgtgtttccccttgggctctgagttctaccaatagcggaatggggttgatattctagtgagactagcaattgcagaattatggttttattatgcccctcagctgcttagctccaggcaggagcatgctgtcttaaaacaacaagaaaaaagaaacagaaaaacgtacaagagtttgtttctcttgttagtatctaaaaactaaacaaatatttatatatatagtgtgtgtatatacacatgtgtgcatacatgtgtgtatagtgactgaaatgttattgatggtgtaacagtgaatattaatttcctrtcaagaagtaatcaaatttctatccttttttctcagatcttatatgttgctgagaccaatagtgtaaatacgttgccttgtctaacttgtagaatgcattaagaatgctttatttgaataaacagacaacctttckttcatgatttaccttcaaatgtcttcttttggattctaaaaaaaaaattagtctgaggaactcttgtcataaattgcttaaccacatggcacctctcttagttatggataaagttcactgtacattttcagaatgtctatactcttttaaaaataaaataaacatctacttttgtatgttcattgcataattttcttatttctctaaagagataatttaaattaaaaatttatccccatgttctacctagagaaaccaagtagatattccagttgctttttcaacctagtgcctttggctgctgaagcggacacagcttyagaataggggtcaagagagaatgatctagaatagatcttgcctcctcgcataattatctcaccatacacttgagtctgtctgtacacgaatgtccctttcttttgcaagaaattcttctgcataccacagcttctccttcaaagtgtaattatccatgtatgggagctctctttcaactctctggagttcagtggatggtaaatatctgtttcttcattccttagtctttgagagttcaggccctggtccgagaggattcaatcctgtgggtaygaactgcttggtaagaacactacccaaagccagcagcatgggccttaacagaccttgctacagatgtccttgtgtgcccgctgcggccagtggagcgcttccatgacctgcgtcctgatgaagtggccgatttgtttcagacgacccagagagtcgggacagtggtggaaaaacatttccatgggacctctctcaccttttccatgcaggtgagtgtacagatttctcagaaatgatttttcttccctttcrtatcccggcattgggcttgctcctcctgatatcttaccaggagggcagatgtgattgtttgtattttaggtagcagccaaaaaaagagatttctaatgcagggcaaccctactgtccattggccccaagatggaccgtgggatagtgtctaaggtgatgtctgaggcttgtttaccaagcaggtgggagtaatggataagtgatttaatggacattcagacattccaaattgcttactggaactgggactggaaaaatcattttcattccatggtaactaatttttgagcactgcatagactaagccctgctctaattccagggtggcagtgatatgcagcttaggttgggccttaccttttgtctstctttaattcaagatgcagagattgatcacagattagttagaagctagattcactggttgggtgtggcccactgaccagtgaagaaatcagatccccagtcactgaagatttttaggcagaggttgagccaacagttgtcaggttgggagaaggatgtccatggtgagtcatcagtagggaattgagtaaatccgtagtaacataccatgagctccttcaggccctctatggaaagggctggggtatcaatgtataaagtccttcatggctctgaaattggatgactctgtaattgccctttaraaggacacactttcaaaatgtgaggactctgtactcagcctgttagttaaactgaatgtttgccattcttcctcccctccttagctctttaccatagagcttcaaagagaccagataaagaaagccagtgttttcaggttatgaaggctctgactaaaagtgctcatcttcttctcaaacagatttttttctttctttttttgctgccatgtctgtgttaagagtagctaaacttcccccaaatgctttgtgtgtatgtgttgtatgtcaaaccatttgagtccccttcaggcaggtagttcagytcagagtgggtttatcaagcttatgttgcaaaccgtgtttctggagagactaaatgaaggcagtgaatgaaaacctctgttaatgtttagtgagatacaagaataaaaatcacatttataggaaatggccattgctggttatggaacatttttcactagaaagttaattccataaatgtaagagctgacttgtgttagcacctagagtactttcgtatatgcaatgtggtcaaactattttttactgtaacctacagtaagatacatatttatttcaaaatcatgcctgtctcccctgacacacatatatgaaatatatgcatakgcctatattgataaaggaaaccagagtttcacaaaacaatgtttactcattctgtgcagtctaatagtttttattctattaagatctgatttctkgctgggtgtggtggctcacacctgtaatcccagcactttgggaggctaagaccggcagctctcttgagctcaggagtttgagatcagcttgggcaacatggcaaaaccctgtccctaagaaaaatacaaaaattagccaggcatgatggtgcatgcctgtagtcccagttactcaggaggctgaggcaggagaatcacttgagtccaggaggtcaagggtgcagtgagccgccatcatgccaccatactctggcctggacaactgagtaagaccctttctcaaaaaaaaaaaaaaaaaaaacaacaaaaaaaacacctgatttacattgtttgtaatgctgattgcaacccattaagttgacttcatgacccactaatggattgtgactctaagtttgaaaatccctgatatacacagttatgcttaatccttacggcgggagttctcaccccgttagtcaggctcatagaggtagacaaacctggctaaagttgcagaggtgaaattctattttggaatttctgattgtggagccattgctttgtttggccatctcaaccagctgagtatctgcttttgctttatattatggctggtgacttggtgagtttgcccatttccaactaagcttcagaaacagagaaagggaaccagtttgggaaaagggtccagctacaatgaacactaccatttgtctcccacaaggtcagaatagccagaggactcttcccatatgaaataccccatattcttccttaatggcttatgtttatagcagatttcctgagtagaagcttaaagtaatcagacattaattaaaccacctctaaacataaccagaaggtgtgatacttcacctccccaaacattttcagccttcctttaatgcaattaaaaccatagcctagagcaaagagcatgaaaagtagcaaggagttggcttgctggataatttatatcatttttatacataacttcgcacttactctcaggcggaaatggagaactgtctaatcccgcacatttgaagccaatggtccccatgagaatactataaattaacacacaatgaaattgcatctaaattattaatgggtgatatttctgaataagcaggagataccatctatctattctcacctctgttggttttttcctacttctaggatggccccgaagcyggacagactgtgaaggtgagtgcttattatgtgcatacaaattaataagaggcgattatgagaactaataaaaaatcacaacgagtyatatgcagcacattgctgtttcattatgttatcttcgaggtcagagagaccctcartgttagagccrtaaatcctgacrttataaactctgccaaacratatgttycccattggtttacaagacatttacttttagtagtaaaattattattgtgcaaacgctaaaacagaaactaaatcaaggagtcckgaaacataagtcaaagtggttcatgtgagagagtgtctaggaaatagcatgtgagcttcctgtgggtttgtgcagccccatgttaagcctggggtgtctttgacacacctttgcttcttgacatagtctgcttttgcttcattgtttttgagtgaagcaataaccgyagcagtagcatcaagctgcctcccttcctttctgttctcctgtgcttctctctgttctccttctcgtcacccccacacctactcttttcctccctgtgtacttaataccaaagttcaaacctaatggagtcagtggagctcaaagatgggtttttaagtgtgctaggagaagaaaggaggatttattaggatagtctctgcttctgtagtaaaaataaaataataaaatcctggctgattcagaagctgggtttcagctcttttcatacaaatgctaattcctatacgggtagattctgcacctaagtcatagaaaaggctctatttttggtgctagaagtcagaagcaagtcaggctgggatgttaatgttacactttgttgaaataaagtttaatgcttcgaagactagctgtgagtggataaggtgctgcccacacaaacaatgccaaataaacgtaagttcccttttgatcttactttacttttgtctttaacacagctattctgggacttttaaaatacaatctctgggaaatacttctaagcagtgaaagtttatgtagggactgccaccatatgggctaccaaattccttatcataaaaaagggctagcctcctaattgctctacacacagggtatggtgatagacacagaggctttcagctttcctctgtcccactgtctcacctccatgtsaggctctaaatatacggatgcaaagaaaggatttaatacctgtggcttctttttgaaatcacttcttgaaatgcaaaacacaaatgtttaaacttggttccmagattttttaaaactcagtattcaaatgtaaattccaactataccggattagttagatgcactatgcaatatctatttgatggaattccttcagccattgaaagcgatactgtagaggcatagctagtgacatgggggaatgcacaaactgtattaagtgggatgcacagaatgataataggtgcatagtaagcatagctaaaacttrtatgaatagataggttatatgatctcaaaatttcatttagccattctaaagcgggatagaaaatatttgctatgcaacasgctctgaatagagatagaaagtagattagtggttgccagggactgggacaaggaaggaatggggaatgattcctaatggatacaggttcttttagggtaatgaaaacgttgtggacttagtggtgatggttgtgcaacattgtgaatataataaagccactgaattgtacgttttaaaatggtgaattttatcatatttgaattatctcttgactaaaaataataaacacacacacacaaaacaaataagcagtgagcctagctgggctgataactatggctacagattgtgtaactccaatagtaattactttttgatgtcccaattatctggccaaaatgtgtaatgtttttgttacctttgatggtgatgatgatggactaattcttaacatatagtacttatatatgaattgttgaatgtggttattgttatcatcaccctgattatttagcttaagttgaactttttaaaacgattctgttttttaaatcagcaggttatgctgttttgcacatctttcagttgtttccaacctgatcacagaagtttcctgatatgaaataatggggatatcttgactcgtttgtagaatatggtggttataagaaaaccaccatacacacacacacacacacacacacacacacacacacacacacacacacacacacacacacacacayaaaatcccagagaacaatgaaggttccaaagctgtccttttagacaaagtatccatatctaaagttgttgaatctgcttttcaaaatgcgatctttgtatcacctgcatgaaaattaactttggtatcagttaacaacaacaaaaagttgattctcagttcttattccaaatctacttatttagaatactgtgactggggcttgggaatcttcattattaacaagcacatcccgtgatagatatttgccagcctcagtattgtatgatgataaaatattgagtggcaatggccacataattatgacccctggaagccagtcttgcagtagccagcccctctaggggacaaagcagcatctttaatattcagctgtccagttgtgaatactacaattcaagmctctgagcatttcatattttggaattcacacagttgcacattttaaggcagcatttgacaacctgccatggaaagcacagtgactgttctcttcatctttgcctctgtgtctcattcttgagattctgcctgatccctgggttctaaaccatttttgtctcatgctgagtggtaatagcaataagcccagtaatggtcttttcccctggagcacctgttgttatcgttaatgaaggtgcaccactgagttagcctcttgaacatgataccactgtagggtttttttgtttcaggggctttaaattctgctttgcaaagaacaagcgtggccttgcttactcagtaaggcacttgtagtcaggaaagggaaatatcaaagtaaaaaagtgacctcttatttcacaattgattattaactctcctttttgggtttaaaaggagtagaaccctgccatccacaaggtgattattgcagcagtttgatgtcctgcaggcttgagaaataatctttttctttcatcttcaaccatacagatccaaacagcctccctgacccttcatctgaagtagctctcctaaagcccctactctctgtcctggtgcatgatttgatttctctcgaggcattcttcattgtcttttgtttgtttggctatgcacctgtacctctgtcttttctctagttctttgagaaggtaagctttgtgaggacctggattttgtcattgtttatgataggtctcaggacacgctacccccaaaatatgctagctctgcatactgagtattttaaggtgaaggaaactgagaaaactacagaagcaggaacatcactctctgacctttttccatttgtctaccctcaagtgtgccataaaagaattctctgacctaacacccatgcaagtaggkcataagaccttcattccagaggagttctgccctctactcacatgccaagaagaatctgaacacacaggccttgctaagttttccccaatttattaccatcaagtcatactcttttatcatccaatcatacttctgcatgactgtccgtaaaaatacacagttgtctttaggtctttatttctaaaggctcccatggcacataaaatttatattaaatatattcgttaggctttcctctcgttaatctgtattgtgttacaggggtctgagccatgaaccgggcaatgggtaaggaaatgacacagctttttctccggtttattttctatgcctcttttgtgtggggaagagaatgrtgatgataatggaactttgcttgttgcttgttggaacgaatctcataagtttctaactttagttaacatgaagtagaagacgatatgtatgtgtattccagcatgcagtcagcaatattcctggaatctctatcaaaagtcttctatattccaggtgttactaacgaagactaaaatttccacgaatcaagttctcaaatcatgttccaaaatgtaattccatctaatctaaccattaaggcaatattcatttctttagaagcgatgctgcttaataagttaaatgtgagctatcttttagaacaattggtatgttcatctttgggtgggaggcggttttaggtatattaaggacagatttattccaggcaggtaatctggaatcttgtaagaactgtttatagattatgcttgcttacactcttctatgtttatggtacttgaatcttctacttagaaatttaattttatagtattaacgcagtgggaagtagctgttaataacttttaagatattagaaattactttttagattgctctagaagaagaagataattatttrtagaagtataattcaaaaattaaatgagataaaaaggaagctcttctgttcactgagaagtttctgtggttctagaacaaattttccacctgaaaatttggtaatctttcagattcatgaaaatgaggacattttatctcttaattaagtctagtagttaacatactttggcatcagaggttccgttaggaatattagccatattaacttcctaactgtgcacctttggatcagccttttagcctctctgaacatcaatttccttgttttttttttttgaatgcggaaaccctatctattatattgaatgatagtggagaaaaactgacgtattgatgttcagtacatggtatatgtagcagagattggctaggatttggacatggatatagaatctgaccagtccaccccagttcaaatcccggccctgccacatcatggcccttggacctcgtacatgtttcttaacgttaatctcaatctcagtttctcatctataaaatagattgtggctaggctttaaggggttgtaactagcattgagatggtttgtggtgctgccaaattcccttaattattatacactgaattctctcgctacgaatgactgccttttggttaaattcttgagaaaactttactctgattatatgacttgtgctatttaaatatcttatctgaacttataaaaatgacactttgaaaattcagaaatctgccttcttaattggggaaaataatactggccctctctgtccgaacatttttakcctctggtgtatgcacagatgatcaygagtaagtcgcggttacaaatcgatagagtacttcacagttacctgaagaaggtagccataggacagaagcctgcctgccccatgctttgctgactcggtagttctgatgtggggcctaggactctgtcctaacagacaccacaagtgattctgatgcacacttcacttttctgaagctgctttcctaaaggagtgataagaagcasttgtagggggctgctgctctcaacccaaaccaatttctaggaaagatytgatgtgtacagaaagagagaaagccttatcttgaggakgaaaatgattttcttttaccgttacttattattttcatttggaaagacactccaagagagatgtgatttgccataggacttttatcctttcattacagccatggtgaacagtgccctgactatgttaatacctaatgcatgtatttcctgcatgaagaattggtatcttcaggatgctgtagcttttatcttgtataattgccttaaaatttgcatctctgccctcagaatgaatccagtttgactgggttggtaaaccaaagacaactgcagtgctcagggggatgggtttgggtgtacatgtgggagtggacgccttagagaagtgttgaggttccaagcccttttcctctggcatgtaaatatctctgacttcccctccctctcccgctcctggtgatttgaggcaaaacccccagtccccagctctccaggcagaaggggctgggggcctgcctgtctcctttgggaaacttcctctctcctactaaaccctcaggccctttcctaagtagatatcaaatcattgagtttttccgtttctagtttgttaactttgatttgcatgataccatttggatcaaagcactgaaagaaaaattaaccaagctccctagtattttcacgttcttatttactttttccctgttcattcaaactcaaaggcagctaaggtgaaagagatgagagagatcctgaagcagggatgagggtgagaagaaaatgcagggaagttaaagcatactgatgaagagggaggactctggggccagactacttggtttcaaacccagagctgtcgcctaccaggtgcatgaaccctgggcgagttaacctttctgagctcccccacattcattcataaacttagaaaatggaggtcttaagagtatcctgtctcttgggastgttgtgaggaccaaatggattaatgcatgtaaatccctgtaaaatagtgcctggcacatagtaaagtctcaatacatgttcaccattagttttataattcttacttcagtcctcacaacaacctgcaaaagtaggcattaatattttacacttagggaaactgaggtttaaagaaaaaaaatcacatactggaaaagcacagttgacagatagtggaattgggattcaaacccaagcctatccaaaatttcaactcttcattatatcatatgaccaggctgttcctaaagaaatatgttgtatcctgtaatcacagtagaagaaactcaagcacaggttttgtaaatattttgtcacccttaccacatattaatctgtattattttgctctgcttggaataatgttggtttccatctaaaaatatccagaggacaatccctgtttattacacaggtgaagcttaacctaaatgctgctttattgctgtatgtcaatttatggcagaattatatgcttttagtgtttaatttttcattagtactaccaaacaaatcccctcagtaattagaggccctgacatatagcaaagtggatatttggctgtttaatttattttgctatttgtaatgccgacacgtggcacatatagtagggacattcagtgttttataggattcagtaaactgtsttttacacctgaggctcagagcctgtaatttctacttaatcactgtgaagtcaaacctcctgtgaaaggcragtgttttgtagaccctawaataccacctaaatgtaaggcgttattattcagtcagagtcttacctttgttgatgtagtaaggccggttactcactgtkgtcattttgctataggatactagtgctcaataactaatcattgaaggagcactactctgcctcaccattttgctatgggtgtttcaagcctaggaaatcaaatataaaaatctctaactccatgtaatcagctcattctaatttcaaaattttaaacctgtgatatccaaatacttggctggccaaactgtcaattctgttaaaaaaaaaaaaaaaagtaaaataaatgcagcccaattaatcatgtgagaaagattcagtacttttgattaaatattagtggccaattcaacctcagtagatgagccatttgttttatttttatttttttgagacagagtctcgctttgttgcccaggctgaagtgcagtggtgtgatctcggcttattaaaacctctgcctcccgggttcaaataatcctcccacctcaccctcctgagtaactaggactacaggcccgagccaccatgcctakctattwtttgtrtttttaatagagatgaggtttcatcatgttggccabgctggtctcaaactcctgacatcaagtgatcctcctgccttggcctcttaaagtgctctggaaccatttgttttagactacaccacatccttaaatacagaatggggaatgaaagmccatacaataatgtgtgccttgattgaaattgggccttttagctgaaacagatccaaatgctacaaacttttgactagtagttattaacagcaggaaataataaaataaaagaacaggttgcttataggctgccatataatttataaacatgtagatctatatatggcttagaaggaaggacacagataacattcttactgcctctgggtggagatagtgaggggaagcagtgcaatgtgggatgtgaattgtaccygagggtttcggctttacagtgttttatttttaaattgggtaatgtgtacatggttgttgattctattatttaaagtgcattttaaaagaaaaaccaagggccccatttgaagcactttccattaagaaatgactattataattcattctctttgctttattatctttagcatatagctagttctcatgcctcctattttccaatctctgagggtggggcccatgaagtagcttcttgaaaggtccacagttgattctgatggttacccagaatatcaactgcaatttcatttgtttatttttataaatatattttgattcttggtctagatgacctggacttgattctttcttgatactcatctcaaattattcagtcccctcaggcgcttctctttaccctttatgccaaagtcattaataaagtaagtctcaagacacaaaaagcagctggaaaaggtaaagatttcatggctgagccagggtcagatggaaaccagcttaatgaataatagacaaggcaacctgcagagccacagatgtggaagaattagaataatgaccttcctgaggacatttgagtgaaaaatgttgggatggtgagactctataatggccctcaggccaaacatggtgaggaatcctttccctccttctaagtcaattatgttagtgctgggaaagggtcattttgaaattttaacttcccatgtcatgaggcatccatcctaccttattgtctaatagatccgttctccaaagaagcctcttgttcaccaaaatcagggaagttgagacatatatcttcggaagccttctccatcagattaatccaaaacctcaggagggaagggcaacaaacaaacaaacaaacaacaacaaacaaaaaaacacacacaaacagtggtttgaaatyctaggcttattcaacataaagataatattattggattccagtaatgaaaacttccatttctttccctggtagtttattcttttaaacaagtcttcctggttcctgacgttacatgaaaaatgaagatggaattctttaagatgttgaccctgcctagggtggttgagaagaataaacaacattgagttaacaaagtgaacacaccaaatattcttttactttgtggtggaattcatttatcctaacgttcacattcaagtctcccactctggggtccatatatcagttcgtgttcccccacaaaatattttcttatcatgctttccatcctggtgccctgacaaacagctcaccaggggcttttatttgcgtttaaattcgtctgttggttgtaaatggtataaattcccagacgtaatcaggttctagcagtataattttgatgaaactgtttggccaaggaaggaataaatgtgactccaagctctgctccactatcagatgaccatcgatgaatctcactctttaaggaagaaactcagagcacgggataattcaagaaaatcccagaggagcaagtgaccttaaaagtcattagcatcatccactacttgacagttaatcacccctgtagcatttaagtctgtctttcatcttcctctatacctggaaactcaaagcactgtgaggtagctgcttccagttctgaatcgctctgatctcgatttcctcactaccaaagtagtctgttcctcccttccaggaaatgagtatcctgcctactcatgtttttctatctggcattcattcattaatttattcttctatcacctactatgtgccagatatcgtcacaggctctgagaacctaagaagaatgagacgtagtccttgttttcaagtacagactttgaaatgaacaccataatgcaggaaggctgaaaaagttgtagaaattctatagttaatattaacatattactccaataagtgtttattgagtgcctactatgtgccatgtgctcccaggcactgggttaaagtggaaggcaagacagcctaggaaaaactctcagtgtattgtcttcttccccttatgtgaaagggaacaaataaaatattgcagatttgggttaatactagaaagactaaaacaaggtgttatgaaatggaatgacatggtggaaggggaatggggtggtatggctactttagatggggtggtcactgaagagataacccataaacccagaacagggaacgacaggcgcctagccagcgaagagctggagaagaaagaccattctgggaagaggaaatggcagtgggaatgagcttggcacattctaggaaataattgaagaccaggtggcagaaatttagtgtagggagagtggcagcaggagagaagtgggaagagtgggcggggagccgttacactgggacttatgctgtggtaaggaattgtaattcaattttaaatatatttgatgttttgatgatactcagagtgtatttcagggcagagggtatttcacatgtgcttatgataggtttcctaaattgttttttttttagtttctaagcccatttttctagacttgaaggattttctctcatgtctatcttaggcactgtggttgtccctctagcattcttcctaccctccctcttgatttagtagccacaaaattaggatgggtttgaactcatctttagctccaggtgcagaccttgtttggtacacaccaggggttggcagacttcttttgtaaaaggccagatagtaaacattttaggctgtgagggccagatggtctttgtcataattatgtatctgactttacagcacaaaagaagccatagaatatatgaaaatgaattgtcacaaataagcatggccgtattccaataaaactttatttgtaaaagcagatggtgggccaaatttggcctgagggccataatttgcccatcccagtctaagtcagttgtctctgccacagtaatgactttcattaatcctttcctaagctatttagagtgtaggattcccttgactttaggaatcctacactctaaaggatcggagtcccatcatcatggaggacttagatgcattagttgtggatgggctgttttctccactactgcttatgaacaagaaagcaggtaactgacagcttctagcagccatcttatattttctagggcaacatgcctcagagcaaaacagatgctgaggctgacatggcagagacagaaagaagctggacactaggtgacattattggattgttgaattaaccagacttgaagcctgcattacttccagacatttaaattaggtgatctggccaggaacagtggctcacacctgtaatcccagcactttgggaagctgaggtgggcggattacctgaggtcaggagttgaagaccagcctgtccaacatggtgaaaccctgtctctactaaaactacaaaaattagccaggtgtggtggcacacccctgtaatcccagctacttgggaggctgaggcacaagaatcacttgaacctgggaggyggcagagggtgcagcgagctgaaattgcaccactgcactccagcctgaaaaaaattaggtgaccaataaagtcctctattgtttaagccagtcggagttgaagtttttactatgtctaacagaagacacgttccactagatcatccactctaaaatattcagttattgttgtttcttaatatgcttaactggcagtttgagtaaacagtttctaaagtgcctctgcatatctgcaatactyatcacatgctagtgggaatctttgaatgaaagtctgtgaatcaatggccctagaagagcttaacttccaataggttccctctagtgcgtgaccacacggtaattccattaactttaacgatggtggtgctgcacaaaatgggccctgttagtctattctctcctttctttttagcattaaatcttatcctgcagctagtttttcacagtaaagtatgtgtaccagtgccattcatttcttgcccttttttaaaatatgcagggctctctctcccagggagggagtgctaagtgagtacattaaaaatgaatctgctgccccatttgtcgactgcgagaaaacccgagtcagggacatcaatggattattattgattgttgtaagatccaataaaatcataaatatggctcaaaacaattactgtggccacattagcaaattatcaaatccataacttgctttggagcccggcctcagagatttaaataaagtgccggagggaggcaagttgtgttttaggaatgtgacaaccagggctgagatagagaaatttatgatttaatttgcygtgcagtctaattgcgaataactattggatttctaaatagtggactttgattaggtttaggtgtcagaaataaactggaaatatgggtcagtttatacttctctgagagkctgtagggaaggggacaggaaggtattcattgcaaggaatgactttctcaggtgaccttccacccttccctctgtgtccttatttcctgtgttggartaattggattatacctgagactggctggctctttccagagaaccacttkttmctttcttcaccaagtgtcagtttccccccatttagaaataaatcaattcaaaatgaaattacccgragcattcatttttcaccatctagtaaatgaatctctctaaagaacacgaggtcctccctttttggttcaggcttcataaaatccytcttttcagtggaagtggtatagtactagtgtctctgccttttctaggcttttcctctctggtggcttactaggcartatttgctccataaaatgtgtattggcatgttcatagattcctgggcatattttgtgaagatctaacctgaagtcgggctgcctggtttaaatttctaacccgcagcaggctggaaaaaagcctctcatggcattgcatcatccattakccactgtagcccttcatctgcggccctggcctcagctgcactctgatgacaagcacaccggtggctagattttcaggagtcgattggctcatctttcagctcactttaggaaaatagaaaagcaatttgcacaaagataaagcagatttcatagtgatctgtgtagaagtggctaacagatttctacgggcagtcagcgaaagcatgaaaacccagctgagaaatgataaattamtgctaactgtcctaattatcccttgataccctgtgttgaaacctgactaaattttgctgaaacttacaaatagggaagaaatttaaggtttaataaattatacgtaatagaaatgcttaaaaaataaaagatagccacagcagaagggcttatatttatcaccccactgtctcctgagccttataaaaaggtgggggtagaggggggtgttagataaattgcaattttaattgcaaacctaattgattatactcagcatgctcattaggtcaagraagactatgagtcagctcccaaggtcattacattamtagagtaagcatgtaatttgtgataagttgatttgtgaacatcacattcttctctttaaacagaataaccaacattagtttttaaggttcacatactgacaatgtgtgtttctttgtattttaggacaatcatcttgtactaacccatcttttggttttatagttttagctttagtgcttttaacatataaatgcatttcaaattcctccagcaacgactaacattttaccagctgtcttattccattgttgaataaccccagctataatagtttgctttttcatytcctttctttctttttattattgtgaaccaacactttgcttctctgaaatatttaccttgtggtcctctttcagacttctctggcaatttggattgattctmtatttcttcttctacctagaaactttgtagaagttgaaagaaaatgtrttactttccctttaaagaatcatcaatgcctttggctgtgtacatggcatgatttttatccctttcccaaactggttcctcccatctcagggttctmtatttggtgactgttctcttttaaacgtgttgcctagaatcacatgagggcatccagatggtataggaacaagtatttattgcggtacttagaatatagtaggctctcaataaatgctttttgaacatgagcatggtttcaccaagtatagagcctcaggtctggacattcttattgcagatgaagtttgcagaatgtgaaatggtcagaaggatcttgtttgtaggcactgtcataatgaggattttgttggttctttttcatattttgaagagcagtgaatctgatgagtgatacaggggttctgtcatttcactatcctcaggaccatctggtcagcaatagaatggcttctcaatctcattgtggacaaatgctagcaatggaatacattctcaattacttttcttcgttaagtaatgatctatgtgggtgctttccatacctaaggtgtttgactattctcatgtctaatacccaccaggctttcatgctaatcatttttctttcagtaggcatacaaagggtgtctggagccctttggactctttggggatgagaattagaagcataactttaattaaaagcagctaagtcattaaattttgtgggctgggaggaccatagaatctttcaagtattcgaaagctgcagactttttccatggaaaaattcacatacacacaaaatgtcgcatttaatttcaggggcctcctattcccctgaggcttacccatggactgctagactgaatttccctgacttgttatcttccaactaaatagtcagggaagattgtattttttgcctaaattgatggggtgaatcttgagrcaagtcacaaagccacattctrcccatgtttgcaaaatgtctctctcactcatgggaaatgcatgctttaagtatttaaatctgatgctgtccactgttagctatttgcatgtgtttccttggttgcaaaattggaataataataccccctgctgttaggattttgtgagtattaaataagagcacgaatggggaggtctctgcttagtgcttagcacacatcgtctttattcaccagttttgttttgtttttttgagaacctactacatgcccacttcaatttctgtgatgaaaacactggacaaagccagtgtcatcctggccctcaaaaagaacatcatctcactctcttcttcttcatctatagtagttttggcctcacccctgtgtgaaggaaaggctgatcagagagtccgaggaaaaccctggagaagagatgaaatggatttcagtttagtgtcagtccccttttaatgggcccagacttactaatgttgagcagattggtttcctaagctatctaagcaagtgagtcraatgaaatggaacgtgccgagttggttctttatgttgaagactgaggtatacccggtgctgtgtgtggtttaggtatgtgtggtttagggtgggaggaggagattccctccagatccacagtttttctccaaagcatggtgcctaagatgtgctttcaccatcaaggagcattatgttactttataccttacatcatggattttttaagtggataatagcataatttaaaaaatattaccatcatagctgaaataaaacattactctggtgttaagtttacaataacagaaagtgagttttttcttaacctctgaagaccagatgtgttgataagccaagctctcagttcacaagaactcattccaattagttgttgaagtttaattacctcctcaagagactaagtttgactttaagttagagttaagacacttgagaggtgaaagctaggagwtgggattcaagggttaagtttagagttaagaaagttgaatcttcagttagattcaagagagctaagttggagatagagttagaattgaatttgaagttaacttttaaatttgataaggttttgttctgttgttttttttttctaaatgcctacatcagattttctttgtaatttccggttgcagcagcagatttgtactatcctggacaagattgtcagaagggatgaacagaggtgagaacattcagagctcagacatacccagaccctcattgggtgggaagtttccctagctaagttggagatcgatggttctttgctgcyctagcagagcctctctcctttcgtacccacaacaatccccaccaccaccttcttatactgacccacaagaacatttgttaggcaaacactctgccatctgttgtgcagacagggcttccaggcagaatagaaacaggtgtggcgtcaaagtaacttagtgcatagacaaggtgaaaggagggcttaaaaattgcatgtcacgttctgagctttatacctccttggcccatggtgggtggacctgaaatgccatgtyttatcaatggcraccctttgtaaccagtttgggctttggatttggtaccacacagctttatggaargacacttggggccgtcattttacttgcaaatagaaacaggctttgtggtgtgatttcttccctgggatttgttttgaatgtgtggctggtttgcagtccccacagaggttgtcagctaatgagggcagtggaagtacgttccttaacttgttctttcagaagtgttgcattaccagagctgcaagaagagtttgttcctattgtcagatgcggcatgggatttttttctttttgccttttcaaattccagggaagaatgagttctttggcagaaatggtgtcaagagaacttcttctgtgattatgtgctaatgcagttctaattgtttctctgcasatggattgagtattgctgacagaggtttatgcaccttccctaaacgggttggtggttacctgctttttacaataaatgtaatgagcatctatttgcattgatggtaacagtactttacagtggcttaatattttgcagtttgtgaagatttttgtgtcacatggcttatcttatttttgtaaggcagtattctgggagtaatgctttgtaacccacaatgccagtgttcaaatattgctctgcttcttcctagctctgtgatcctggacaagttatttaacatctctgagcttcactttcctcatctgtaaaagagacataatgatggtgcttggtgtcatagagtagttatgagaatagtaagagttaagggaggtatgggacttatcacagtgcctagaatatggtataactcagtgcatgttagctattatttaattattaacactatcaatattattaattttccccagcattgagtgaggtagctatggtgccaggaattttatccccatgttaaagatgaggttaactgaggttcagagggaagcagtgacttgctcaagacctagaatccagtcagaggcagagttgaacaggaactgagaccccgttacacctccaacatcaagaaaatgttgggggagtcctagtgaaatcagctcccacaggctggttttggtggcgccggcctcatcagaaagtgggtaataacctcagctcccagcagcaacttttaaaccacatttaattgtctgtggagaacaggatctggaagtcttcatttgagagaagacaccttctctcaggtagggttttgtaaactgggaaggtagagaggctgtttgccaattggggtttgaggtttcgtaaattctcccatcctcaggctgaatgaacacctctcttaaatgagaaatgcattctacactcacattggtgttattttagagtacccataccactgttttaatacagtccagggataaccagttttctctgtaaaacacatgttgattacttgctttgtaggatgttgttacaagctccaggtgaagaaggtgtgtgagactcagtacctctctttccggggttgcaattctgtaggaagagcaggaaactaacatagataaccagaaataggaggcaacatgtcgtaacgaccaaggagtgagttgaagatgaaaagcaaacaccatggattttggtggttaaagaaatttcccrgatgtaagaaaactttcttacctattgaagttgttctaccagaagagaaaagggagatggcctaagtgaaatattggagaggcaggaaccattagtaggatgagatatgtttgtttttagtttgtagaaaattatcatttcattaacgacctggacktcttacgggtagaataactaaatccattgtttaaagaaaaatatcatcagtttgaataaagttggcaagtgtgtggtagattcatttcattgtagccagaagcattttcagtcctgtcttcatatctggaacctgagtctttacactgacactgttgcgagggtgtgatggtgactttcacgtgttctctctgttctgtgactaagctgcatgtcartgtctgtggcacagatgacagctgtatcctctgccttacttctgctgttctctgcacaaagcactattgaaaccaagaaaattaaggaggcacaaagcaggatctcttatgggaaaaactctaatcaatatttagtagaaatcaggtactccgaattcaaagatgaaatactagtttttgccttatgttttgatcatcagctgtttgatccagtctctgggagtaatgtatttgtagcaggtttctgaaaatcctgatgtgttgttggtatacgcttctaaagatgcgstaatagggaaatactttggatttagtgaagactgtacttatcggtccaattgaaatatcctacaaattgattttagcattagtatttatttaaattaaaacgggcatctatagaccccttgggcagcttaattgtaaaagtaattcttaaatgtactacgccaggaaaacaatataagttactcaggacaaatatatgtcttaaacctgcgggagcttgatggcaggtcacttctcatttggttaggtttaaagtaacaatgtgtggcaatgagtaatagtactaatttctgaagggaagtagtaggggaaagagtcttgggctctgggcttcatgttctatattcttatccaatactgtttagttctacagccttggacaaatctttcattgttttcttcctctgtttcgttttacttcatttttatgttcctctcttcctcatctcctcttccctgcatacrttaaagactctttcagttgcaagtgtcagaaaacccaaactggctacagtaaatggatgatttattgggtcacataattaaagagttcaagggaagtttctgacttcaggtatggcttgatccagggactcaagactctgtgtttctctctccctctgtgtttctctttctctgcaaagggactggcatgagcctaggtataaaggtggcagtagtgagttgagcatcttggccgacatatggctgtgtgaagaggatcagggagacaacgactgttgagcagttgcagggtctgagcataaaaagattcaggagccagggtctgctctcggaatttgactcagaaagcattcaggactgatggaaggaaggaagaagggactaagatgaaaagaaagatgcttcctagagaataacccgatagcaatgaataggatgagacttaagcctggggtactaatgtatctgtctgtttgggattataataacagccagggtgagacaagtgaaattagaaggacgtgataaatacaagttgaatacaagaccccactggctaaagaagtgctgtggaacccagtagaactagatgtctatcaggatcatttacattgcaggccaaaacaagtcaaacacacacagcaaatacttgacaaaatacctttctacctggagaagatcttagtcttttttctaaataccaaaatatcactaaaagtctatatggtattgggtttactgtgtaaatttacattcacaaaggctgtgattttctgtttgcaaagtcagacactactatacaatgtcattaatccattcattattcactgagcacctgctgagtaacacccactgtcacacatggcctaattctgcttctcgctaaataaaacagatgtggcccttgatctcatggagctggtagtctgctgaagtgtgtcaatcctcaagtttacccacaatacctcatctkgatgtttaaggtttgaactcacggaaggaatgttgtctctakgatakacaactggaaaatgtaattgataaccctgttcaactctagagtccttctttccacattactatgtgtktatgaattataaaaaattatttcctggaatcttttgttcttgatttatggcaaaagctctataatgactatttttaaaatgacttaatgagtgagcagtcttgcctctgttctaaaatgccagtagatcacttaagtgtcatttgttaaaccactttggtcaataaaaaccctctcattgtttttccccaagtggttattgagccacatcacaccaacctagttctttgctcatgttgctctatctacttttggctggtgtggattattattaattatttcttcacagaatactagccaagagttatcatgatgcagtaatggtaaatgctcacaaagataaaatgccctaattagggagccaagttaaggagtaagcagtttgcaaagtggattgagatctggtgagagcgggttcccctcatctgcttccatatgatttgaaatgccaactgcttgcttaatttmgaacaatatactttctctaaatgtatttttaagattcatgtttattcctttaatagctgatttaaatgaaccagcaactgatacaaatccacaggaaaaagaattagaattgctaccgattgaggccaacatggtgcttggcactgaaaacattcagatcattcccctcactctcatcatgccaaatagtgccctgtgagcaaacacagatctcactggggatattttcrtagtttcttttctgattacagagatgatactcgctcattacagatacttttcgaaaatacataaaaatataatgcaggaaattacaatcatccatggttaaatttatatttatattttagctgatggtctttttaaaaactaccaccagatacaaaaaggcttcataaagtatgaggtctcctattacttcccactaaaggttaaaaacaacagcagcataaaaataaggctttgctgagtttgtcttctcatccgtctcttgactctttcttctactwtgtactagaaataaagttctctgtggaggaaragtggggaggaacccctgctactggaaagtaatcctctttatctgtctgtctatctccgatatttgtggagaggagtatgtctttttgatataatggaatctgggcagatgaacacaatttgtttacaatsaatcaatgtggaaatttacaggggaagggaggtcagggtgatggggaggaagcttcacgttccctgagaatgactccctatgaagacacccaactcaatgcagatgttcttcttgtagaagggacataatgagatctgctctcttcctgttacttaggtatagattgtagaatgtgattgttttgcaaaatagaacgttctttatactgkgttttatatctcagactctaacatgcccagccctcagagaccctgtgccatggtgaggtagttatttggaaagcctcttgtcttcccatggtcacttytgaactcattgttggagtgaatgttaacctgagtgtgaaagagcaagcagtgtctcactttaagtagaactaaagctggggccttgctttgttccctaggtgctggccgagggttggaatgaaagtcctaatgtgtgggggaagtcagccatctcattccctctgaagctaaactgacctagtgaaaaggctgtctccatattctcaaaggtttccaggaactcaagagctcagtttcctcatatgctaaagtgagggcagaggagcctggcttgaaatgagaatatctgcctttcccgaaaggaaatttrtctgccattggaagccagataaaatcactgttcatctattttttccaatttccaggtacttcagattggctccccttcccagaacctctttaaagcctgagtctaatggccagacctccatcatccctaccccaaactgctcctcaatgtgcataatctagagaatctaaaaaatacttagagcattcatttgtattcattgagctgaaattgtgcatgctgtcagcataggtgggagaatctgtcttagagtagctcagcaaatactacctgtcctttactttcagagctttgcccctgtttcctcctgctcgaggccctaactgcattcscctatcttggagggcttgtcctacttcctacttacttracctctgcttctgctgaagcccttggctcagggaccacccccacagggaagtcgtccttgatccttcgggtgtttgctcctttattttgagatccttatctcagtttgaaacccttaggcacaagtgtgatgatttgattaaaatccttcaccaggagactgtaagctcatgagaacaggggacatgtgtatccccactgcttagaggagcgccagatacacagaaagaactcagaaaatacctgagtgaataaatgaatgggtgaatgaatgaatagatggatgaatgaatgagtgaatggatgaatgagatactgtgattataatgttcaggtaaaagtctatttatttaaaaagaaaatgtttacaattttgctttattcgatcatgttacacataaaccaacaatagactccaccagggcataagaggtgagagaaataccaaacaaagaaatatcaaagagagatgcgagagtaagtcacgaagcttcctaaatttttaatcctacttttaaaaggtaaaatcagatattttmtcaggttgtttgtgcatttttaacgaagttaactttggaatattcagcactgaaggtgacctgcagtatctcttgctcaattttggaggctgcctgagaatttctcattctctgttgcttccagatttccaggaagagtcagagmctcacactttttacttgaaaagctgataygcattccctataaacctcccaaatgtgtgaaataattacccaggaaacaaaagagagggacttttacagtcataaattcattcaaggatctacatgaggcatttttctgtagtgggtcaggttacrtcttgttccccttttcaaaatatatttcaagctatgttactaaaatgtacctaaggcttcttgatataggaaatagaaaaataagactttagatggggcagacatctctagtacmccaagtctttctttccttgaaatatcccttcactttgaaaaacataagtaggccatgtagggaaatgcctaatgtgaatttctcctaatagccccaaactcttctttcaaattactacaaaaggaattcaggatttttagtgccagattgatgaaaaaaaagtgcatattaagctttccttattaattaaaggcagagaggaaagagtcagcctcgctcaaatttataaaaacaaataatgtttggaaatgagcttacartataaaactgggtgatgctgtgtcttaatacagtttgccttcatgttagatatcattgccatgacgtgttaaaacatctaattactggtgtgctgcaagaaagaggaaaatgacaagattgtgaatgtgatttcaagttggasttgggaaaccattcaagaaaactctttagagaaacacatttgcttttgtcccatgagacacacacgatgaactaatagatcatccttggctctaatttctaaccgtgttcacagccaagctcatttataccaggtgaatgatgatctggctcatcacaagaaatagctagtatgatgaaaacttttacagagtttcaggaaaagcagtcctaaataaataaataartatatataggatttcctatagaaaaaatatataaatatatatttttatgtctatattatttatataattatatattttatatctatataaaatatatagattttttatatcttcatatctatatataatatagatatatatagatatattttatatttttatatattttatatattttatatttttatttttttattttttaatatatataaaatataaaatatttttctatagtaaatcctatacatatatacatatatgtatataaatcctatacatacgtacatatatttttaatatataatataaaatatatraatatataaaaatatgaaatatttttctatagtaaatcctatacatatatacacatatatacgtatatgttttaatatataatacaaaatatatttatattatatatttatataaatatatttatatttatatatttatataaatatatttatataaatatataatataaatatatttatattatatatttatatatttatataaatatatttatattatatatttatatatttatataaatatatttatatttatatatgtatatatttatataaatatatttatattttggactactttctcatacccagagccctttggagtccaagggagatccaatcacagacttctgggtgatatagcaaagggaataactgtttgagaagtaagggcacaagaaggaaaaatcgagttggagaaaagacagtatttggaatcttaatccttctttgtacatgtggtgtttcttaactatccttccaaagggggtgccgttgaattttatttggacagtttactcctactgagagcttctcagttatcttaaggatgtgggaaattctttttcttctttccttgtttttggaaagaatgagtctgtctgagttttcccaagaaagttagctgctacagtttcagggtgrgcagccataaastgtgaaccgctattgatagtgcttttttctttttgccgttataatatgcttaaaatggagtattccttgacatgtgcaraccgcaaaggaagtgatacttggttcagagttttttttcttcctctcattccttcccccatcctttctctgctctcctcttcctcttttttttctctctctctgtttgtgagaggggagtatagtactgaggggaccaggctctataaatgtatcctaagtgtcaagtaggtttcatttccagtacccagttctggaaggccagtcatgactgagtggacacctgcgctgtgacggattctaaggttcagcctaggctcagtgtgaaagtgagaggtgatcaattaataatgtctcttaagggcatgtgccacatatatttgctcaccctgctttaagacagacaggactcatcccaattctcacagatttttaattttctgtttaagtctttagtgaaattgagtactcacagctaagcggagctggacttgtgaagttgtactcattgccctgagatgggaaatgccaaatggtaaagataatcagcacagataaaattaccttttagcaaattctaaattatgtacatagatgttcaagattcaatgtaaaattgctttacttacttacactttattttttggaatagggataactggtccttagaccacgtagtttgttactttctrtacaagtgtaatggtttattgaaagcaacacctgataatactctaaggttttacaaataaccccctatgtctggagttttggcaaatactctgccttaccctgccagtgcagataaaatggaattctgtggcatttggaaggcggagcrttctgtgtttgtaatggagatcatttgggctctgcaggrcacatttgaagtcactgatgccagttcaatccccagatgggcaaattaactttagtcctttccatgtccagaagctgcatgccccactcaactgtcaagagttagagcaggcaactctgcagtgcctctggacacaagccaccacagagaagatgtccctgaagagtttcctaaacaaaatgtaactcactgtcctacgatgggaactctcccacttttccartacctatctgagattccatttctgattcaggttcattactggatcatagacctcaacacacctggcttagtaatggtgaagcccaatactgctgaccctgctgctactcttaagattagggaccacatttgaagttgctgttgtgaagaggattatgacatgtagcccctggaatctgcccctgccccgcccagttgtgctgggtattaaataagacaataatctttgttttgtccctcagtgtatgcccatcatctagaagaaaactcaaacttaataggagcttggtaagtatttgaataaatgaaggcacattttcataagtgtgtgttactggtattagccaaggctgtgtgccttggttccwttctctgggactcacccttctcatatgtgctaaggttattctatttcacatgccttttactctgcactctggggctttctcttgctggtgtagagtgtaggcctaaagtgtcaggaattattgactttaggaacartgtttagccaataccagtgggaatttgaggataaattccccagcttcctatgtcgtaagtgcgaaaactcagagggtagcatgttccacgctgtcttccagagccccccccagtggatttgagccccaattgcttgaagcactaayattcttataaatgtttcttgtagtagatttcttttttcccctgtcttacttccacttctcccctaatggtgcttcctgggcccatctctcaaataatccatttgtactcagattcctgtctcatgatcagttctggagaaattcagtctaaggcattaatgataataaagcagtaaagagaaagaatatgargttcagcatatctcctgctactactgggaaaacagtctggtgcagcatgcccaattctcagtgactgagtttcaccttggaatattagggatagtgtgctacttagtaagaggcaagagtattattcacaggaaagttaagtaacattgatcttctaggaattckaatacaatttagacttggttataattcgtaaatatatgttctttgccctatcacttcagtacktagaggctcttgtttttggtctatgcagcaactcttcctccctcatgactggattaattatagttactcaatcccctttggccacaggggtaatacaggaatggagacttgaccaaatcaggtccctgtctttgctaatatagggattttctggtactaatggggcaatcctctcattcttctctgattactaggttgggagcttcctgaggccaccttccacagccaggttgtcatctttattctgagagaatgaagccaacactggagagggaaaggactatacattagtccrccttatctaaagggaatacattctaagaccccagyggatgcctaaaactgcagatggtaccaaattctgtttgtactgttttttcctatatgtacatagttacgatgaagtttaatttataaattagacacagtaagagatcaattactactaataaaatagtacaactataccaatatattgtagtacaaagttaataattgtggtctttttcttgctctcagaatattgtactctagtcacttattttcaggccatagttgattgtaggcaacttgaaaccatagaaagtaaaactgccaataggaaggtaggactgtactggttctgccttaacattcctgaggatgtgtttatgtgaaccaataaatataccccttctttttgttccaaaagagtcctgacctgctgggagtggtggcacatacctctaatccyagcactttgggagactgaggtgggccgactgcttgagctcaggagtttgaggccagcctgggcaacgtagccaaaccccatgtctacaaaaaatacaaatattagctgggcatggtggcacatgcctctagtcccagctacttggaagactgaggtgggaggatcgcttgagccagggaggtgggggttgcagtgagctgagatagtggcattgtgctccagcctgggcaacagaatgaaaaaaaaaatcaaaaaaagaatcctggctaatgcacgatgcatasgacttcatcttttccttgctagaatctctaatttacaaatagaaaactttggatttagtaattatgccagtaatgtgtagaagccacggagatgtctcagaatcccagttccaagacagtagggactggggctgatgtgctggtctaggcctgctccctttttttatctmttggtacctaataaacatgatgctgtttgatgacctaattacattgtgttaacacatttgtagttagccacaagcacttaacctagctcagaacttcatccctttctgcaagtacggcatataccrgaaattgagcacagaaatcttaaagcagattaaagagggcaaaaattcattgtgaaatattcccaaagtamagttagttattacacttgatcttagctggaaggccaaaaagtgatcacagttagttattgataatatacttcactttaggtgaattggtttgtgctagctttgcagcctttgaaaaccctgtgggactggcatcccatttcctctggatactgcttataaaaccacaaattaattttttttttcttctgtgatttcacttgacactggaatctcaaaagtttmttgggggattttttgttgccccaaaagctacaattaaaagacagattttcataccttctttttccacttaaacaaccatcttcagggatgttattttgtgtttatttaaatattcaaataggattcataagccccatcttcctcactctcatcttcacaagctaaggcagtgcttgagaaaagagaccatacatcactatttattcagctaatgtaacgcgaagagctctgtttgaatagtctatttatctcttcatgttgtcactagagagaggtaagactagccagtgcttagtggtcaaagaatacctgttcagaaagaagtgaagtcaactgatttttaataccagatcaataattttttttttctttttgctgaccctggyagcaaaaaggagtggcagtagtgtaaactgataccttgaatcctgtgggatatttttgttctctatcataaaatayaattttaaattaaccacatcagactttttcttgaattccagaaaatgattaatatcgattccagagctgaaaggcttttgtgtgcatttcaggttaatttggcatatttgcctcatttcacattaaatgttttatgtgtgtttaacttstctatttgmccatttagcattmgagagactccataagaactgttaattatcaagggcatctctstgcgttaatgtgcgggcaccgtggtatgttctttactctgaggctgaggaaatgtgggctggatgtcaggtgctgtgatgttatctataggttcggtaatgtggccaggcactgccactgtgggaatctgtgtgtaatgaacaaatttttcacgtccccactgatggcctacatttttgcagcaggaaatcagagagcacagttcaagggcagcaatagaatttggatattgaatttgtcacagaagcaatggcccattttcagaaggccctttgccttatgaaaccagctaatcagctagaaacatagggattactctgaaacttagacaagacaggacagcgttcagttcttcctcatacaggggcattccaagtgtggaaattttaatcctttgagttaaaatttwaaaaaaatgtgtctggattcaggaataatctaaagcatagtattcttctaaactccatttccatgagatgctctaagaaggtttttgtaataaatccattttactttgcataatgaaatatttttcaaacttatttctccatggacccagtgttttttttgttggtggtgggttttttgtggttgttgtttataatagtgaataascactaaaatcttcagatgctttgtctatagatacttttgggtaacataactacaaaggttgtcaagagaaactaatgttattttcacattggcagaatttcatgttcatagttaggattataattaattttaggacacattgtaaattatgaaaacagtrgtttagttcatttgggatgctctaaggtaataccacaaactgggtggcttataaaygaccaacatttttttctcacattcttgaggctgggaagttcaagatcaagacactggcagctttgttgtctggtgaatgcccactttctggttcatagatgctatcttctccctgtgtcctcacatggtggaagggatgrggcagtggtgggaaacrgccccttgcctccttgtgggacaagctatccttggcctggccatggcttctccaggctgaacttgagtcacacttgggatgacttacacagctttgtgatccaggagctccactagtttgaagctcttctctgctatcatcccatccatcttatatagacaaaccccrtaaaattccaaagtccggttagaaactgtagaatgagggctaattataacaacytatagctaaagccagagrcattataccttcaggaactgggcaaaactggggactcttgaagaacatagatacatagttttgaagtatgaagaatatagatgcacacttttgtgtgttatttttaagagttcaaggaatccttgttgtccattcagccaccttcctctggcctgaagtgagtatctgccttacagttggcagakatgaggaattaacattcatgccaatgcccaaatttgtgatgatcatgaagagctggaaaggtgagttaatttagtgagttagcttcagtttctttagatagtgtcaaacttaatgtgtaagagggagagggggaaaagagcaatgtaagcttaagtggygttttagaatatcttttcactggggaaagaaaattgacaaaagattcaaatttgttaaattaggaagaaaagtcaatatggtgtatttgccatctgtcagacacattaagtcttctctgtcgaacagtgttgtcagctgaccttattatgctgggaaggactggagaagagctactgtttcatytcccagatttcctcagtctcccattaagaaagtgctgaatttaattctcatttctgttgctttttatgtggcaggatggtgacgctcagtttcacagtttctttcttttcgaaaacatgtactcttgtcacacgggcttactcatttatgggcagggtgggagtatagcgaccaaaccccttcttatttatccagtaaagcaccacagccccaccatatcttagtgtagagtttcaatgtgccccattgataggaatgttccatgacagcgtacacgttctaaatgggcttaaccaataatttcttacccctgcctgagatgtttctatttaaaaaagattttgggatccatargaaaaaaaatgtccccaagggattctctaaaattgtttattctcatagctggtgttttgcaaaatgctttcctctcccaagtctgtcaagtaatttttataaggtctccactctagacattcccaactaagtatcttgttttccctgaatcttggagatggaaacacatgcaaaatatgtgataagaaagcaatgagggcaatgctgagttataaaaaatatctctgrctttgaggagttaggtataaatgcactaactgtacaaacaacctgtgaatctaaaattctgccatgcttctgtagttcttgaggaccacaagaccaaggttggaatttccctggctgcttctgagagstgatttgaaagtctgggtggcccctggctctgtgctctctcagcctcagtgtgacatttttaggcacacatgttaaaacagtcttcagatgttcaataggaaaccaacacaaygtcagaaagaatagcaccctaacaatttcacagaatggtttgcttatgtctgtctgctgaattcctaagcctccagatgcagagggaagtattcagttagttgtckgttaggttcacactcacttttcactacccttgccccccataatttggaaacttgacacattgtcttttgaagaacagagtctgggaagcagtaacctggtgtactggttggaatatagtctcacaaatatccagaccattgagttttagcctttttttaaggtcccagatcccatttcttagatcgaaagcttctcaaataggtttctgtatgggctttggggagctgggcaggagggacactttcaacctccaaaattactgaaaaactattggataggcatatgcacatagttttgcagtaattttggaggttgcaaagagtccctcctcagcagctccccaaagccccgttgtttctaaacttctacttagatacttgtatgggttgtttcagataacagagtagaaatgctgagaggtaaagagatggccactagctagttaattrgctgtttaactattccagcctctaatatttatagtaaggcatttaataatatttaaaatatttacatcatgggtataactaattatacatgagtgattttgggactctaaagcgtagtaatattgtagatatctmatggtttattttccatttcaggaagaaataacgtactttaaattttaaataaggttgtaattggcatgtaaggtggccctctcagcacrgctttatgacaggccttcttgaaatttgctggccaagaccacaaactttagcgagtaaaaacatacaggctttggaatttgagtccaaattgcaagttattagccatgsaactggagtaagttactttgcctgttttaggcctcagtttcctcaagtattattgctaatttctttaaactgaaattagcaataatacttacccacaggtttattatgaggatgaactgagattgtacatgacagcccatacatagcatagtgtttggcacatagtaaatgcttgctaaatgcatttattaacactgtactcttgtctgatgagagtcttcacaaacaacttcatgactgtctttcgtctaagaaagagtgatactaaaacaaagcatgagaaatggaccaccaacttctgaatattccaaatatcactctctttcttttaatgtgtctatcatttaataggcagrgtaactagaactatcagaaatttgtccttggtttatttggcttttttgtgtttaagtcttttgtcctggagctacagatagataattataaattcattcaatcctggcatgagagaatctctttgctttagattttttaaggggaactatggacaggaatagtttcaaattccgcttttaattgttagacgaaacaatgactgcaacgcggctgactctatcaaaatgtaaagttaaatcagggttacttgttcagtcytgacacaaagattcctgtcattgtgtgtgataacctcttcgaggcttgtaaacttaaatacgtttatttctcattaccctttttgctattattgtggccaatggtggattcttctactagggttgtacatcagtgctggtttgkcaggctggatttattttaaagaaaygcttcagggatgcctacttttccaccaaaaatcaatcaaaatgttgtgaagggagcataaattgtagtcatctttgctaggagagccttccaagtagcttgaaaagaggccttgatagatggaagcaaccgcaggctggagtctgggggacttgcctagtggctaagtcaggaccatcagcagatgtatgatattgggaaaaacacttttattttatctgggactcagttgtgctatctataaaatgagagagtagaaaatgcattctaagatcttaatgtcttttggttcccgggccctctctgatcagctaaggaagggtatatccaagctctatggataaaagcacattccaagataatttcaccagttttcactgtcccccactgcctgatccacccacccagagaccccaaccccaaccaggtggtgtgcagcayctcaattaaaagcccttcaccattagatgtgtcttcaagccatgcctagttccaaaataaccttggagatatcttgcattctcgttctcttgcttgagttctctgacctctgagggtcaggatgtctttgttgtataagtttatgagcacgatgaaggaggaggagatattatttcacttgacatttgaaacaactggcctttgagtctaaactgaatatcatctcccttgtaagtatttctaggggaagcctagatatttggaaagtgctaaggcaaatatcgatttgatttaggtagatttcaagcatcaaatgtggtggttggttgtggtaggtagggctgcgtgagaggctggggcrtgtgcctggagatgttaaatattagaatttcacccctttttctttttctctttcttcattctctttccttatgacccctccatgacataggtggtgggctggcctttgtctgattcttaagacaaagtttctaaagaaactttgacttattttcataaagtacttaattatttgaggtgttatttgtttgtttgtttgtttgtgttttttgtatttgaaaagtatgctgatttgcccaagacattaagaatgatagttgctgattgttaacttcctttagcgggtatttttggatttgcttataccatatattattctcttctggggagtcagggcagggaagagaaagaacttcgattttatctaaagcatttgctcagccaggttgaatgctacttctgtttatgtgattattgaaagcttcctttaccccccagacagcatccagtacttgttgggagccatctcattttatcttcatggcaaccctatgggataagatgcagttagtttcctcattttgcaaatgaagaaattaagggtcagtccaaggtcactaagcttataagtgattgagttgtgtctgaacccaagtccttcagagtagagaacttaaactctcactaatcacctaggttgtctgggagcattctagtacaggggaggaactggagaccttactctctgtgacggtaaaggaagtggagccagataatcagaaatctaggtcatgtaggttggattcctagtccaatctgttaggtcctacctcactctttggcttactacagttygttgccagttctagatctgctataagaagtgtctattctggacctaccaggctcccacatgctcacagaacccaccttaaccaagttctccaggatgagtctttttatttctaggctagtatctcttgattcttcctgtaacgcttcttactcttccttctctcctgctctctttctctaatgtttttttaaccakttgtaacattttgcaacttcaagcagaagcattctytgtaccgtcaattgtagaaagagaatgataatagttcctacctttattttaatagttaataattataaaaataatagaaagaaaataaaaataatggctaacatttgttgtttagttactgtgtggccaggaactatgcaaagcatcttacagtatatttataatctcattacatttcatagtagcccttttatgtagtgtcctttttatcatctcccttttagaggtagccacttgggacacagagagtttaagagacttgcccaagataaacacttcataaggtttgggacttaggttatctcactctgaggcccaagcttttggctattcatttatgttgccttcttctaattcatggaaagcgaaaggaacagtgcctagcaaatgccaagaatctcattcatttgccagcaaataatctcagagagaatcccctgtatcctagcttcttgggatacagtaatgaataaaactgataaaaatctctgtcttcttagtttgcattttggttgaggggaatgagggcccacaaaaaaataagtaaaatatgcacatgttaagtggcgattagtgcaatgaagaaaagtaaagctrgaacagggactagagaaggctgggcattggcactgaatataagtaaaatyatttgtaatgaatagccgtggtagaatgcaacctgcttttgttgggttggtatattgaccactgataaggtctggagttggtgtagaacttttctctctactatagactcaatttccatatctcccccgacaaccttagaatattaggtagctttgcaacatgaaactggaattcacacacctaaaggcactttcagcttatagtgtgagttttgtgatttaacatttattgggcttggctgctgtgcacacagcagtcatttaggtacgtataaagttgatattctctgcccgcaaacatggttgcctttacatagactcatccttcactaggtttgctgattgtgtcactgccacttaaatgtcacagtattaagcacaaggaaatgcaagacagatgaggtagaaaataaagtctgtgtttgtttctcatgcttggtgaaggtgttttatagacactggaatagtcagtggaactaggccaggatggcctaaatacctggtgctgaagccaataggtaggtgtttaattgtagaaatgaagcatctaaccaacacatttagaagcagtgtttaaagacaaatttcaccatttttactttggaaaataagactcctggacttactgtacgaagtgaggcaaaactatgcacagaatgagaacacggcttttcttttattattcttccttctcttgggcactgtgtagcaaatcatctgtcattttggggttggggtacaacttggcctaatagacaggcaatggtaactctctggagtcataacagttccctttggcttgcctttatggccagtatagattgctaaggctatagcaattatgaggcagtccatatcagttgttgaaaacaatgccatttttgcccaagagaaccatattcttccttatatgtggcacaaactagttttgtgggttttttttttcttttctttatcccctacaaatcattgtacttgaagatgccacactacccctgtgaagtactgctgctctggtcctacttaatagtaccacaagaagaaataggaagcttttamacattatacstgtattttcattggtggtgaacagttagttatggaacctctcctttgtgccagaaatcagtgggctgagaagaaaaatgaaacctggtctttggcccaaaataacttcaatcagcaaatatttaattgagcaactattatataaatattctcagaacttatggggatgaaatgttgaacaaaatctaacatggttcttgccatcagggaggttacaatctagtgggatagcaggaaattaataaaaaacttaaaattacatctttatgctataaagaagacatgtttgtggtaggatatcttagggaaaactggcctagttggaaagaccacaagagatcttctttaaaacatgattgaattgggttgtaagggatgaataggtgtcagtgaaggcagagacagaggttggggagggatacagcatgtgcagagggcctgtggcagaagagagaggttggtgtggtgggagcacaaggcaagagaagaccaaaaatgcaagataaggcagtaaagataatggggccaactaaagccttctaggcttcgtttgggatccaagtctctatttttartatggtaggaaatgactgaaggccagaaacagagggaatcagaattgtgtttcaagagcgtcactatacggttaggatggaagacagattagaggaaatgcgagtggataaggcaagatgcatttggaagacagtcaagagtttaaccagaaagagaagacatgtcagtaattgccatcatgggaagcagtgagaagcaccagaattgagaaaccaagtactttaagagttagaggagggagacacaccctgtctagctgaggttcatggaagagttggtattcaactgggagggattttatcagtagaggagctgagattgagaatggggttgaggaagagataagtcaggagcaaaaatacggaagtgagggagcctgtgactgaagagcaacatgtagatcaatttgatgaaagcactaggtaggggccagcaaatactggtttgcttctgttttccagagaacctcgaggagacaaggtagaaaaccaatcccaratgaacaggagtactactgagacctgtactgaataagacaagagaaactcagtgagctaaactagggtataagccacttgcaggagcagagcagggtcaggcattggtctgacttgctgtgaagacyttaagctgtgaactcataggacttggattccacttgtcagggagtttgattggttcagaatctggggcaggatggaacctgcaggaaaaagctgactggccccgtgtgagacaggtgacactggaggaatgaagaataggcaccctcagaggtttaggctggaggcttggtgagaatatcaaccctgacccatagagctactgaaatgtatgatactacagtgagcgccaaggataccttcccagccaaacatgccaaggaatagtctggggatggctagtgaaccaagcttcacaggtagccscagttcttcatgagagacacacttgagttgctggcaataatattcttactgtccaaggttaagtggccctatgtctcacaaggccccattcagggcttatcaagcctcttgaatattccatcaagttagtctgaaactctagagtrtttactttatatgttctgaacttaacagggcacattctgtctctaatatcttggttctgagtacccatcctcactaggacactagtgccatcttgctagctggtccatgagttacataatgatggagcatctcatatgtgtagttctgtaacagtgaccaagcagtggacattcctatccattcaaggctgaacatgtgatggagcaaggcatgtctgcacagggcctagcakgaargggttgaacccttataacttggaaactaactgaatgggagaaatgagatggaataargcactgacgttggtgcaatttctgattatattttgttgccatttaacttgtttttactgtatgccacaccctgtggtaactcgtttcatctgcacagtgacccttgaaatgcccacagtatagaygagaaaactgaactccttagaattgacgtatcttgcccaaggtcatacaatgagtgaatggggcaacctggacatggacttcagtcttcctgagctcagagctgaccaaagactctgtctaaacttccaagacscttttctcccattggttgatgcacatggtattgaaaaatgtcgagcattctctttctctgttgaaaagttctgcctcccattagttatgaagggaatcctacagaaaggggtgagtcccttaaattcttcaaytgattatgggaggttagcaaaaaaagagagtttatgaacccatgaaaccttaggttctatstatcagctgtgtcttactgaaatcacctcttgaaccaggacccttcagacatagcaattcatgtcctcagtctctggacacaatggaatcctcattataaggccttccacacaaagataataatagtggtgcctctcccatgtgtgttcacatttttgagaaaaaatattcttgcagctatcaaagcacctgctaatcaaagatttcgtattccctgtaatttgtttttaatcttgtaaagccgactactttcaaataggactcagagtgtcaaaggctgaaattcatttccttgaacttcatttaactgggccacagaatcattctgagagaatcatttaaattaatatgtggcattacggtgttaaaaagaaaaaaattttgtcctaattcccaatttcagagtttctccagacctccaatctgggctctgaccccataattgtgtgcagctgagctgctgacaagtccacacatattctgaagtcacattttctggctctggggctccaaggactcacaaagaggaggaatttttttttttttaatccctgcttgttccgtcaactagttcaccggttaaaccctgattgaatgtagaaattttagaaatgaaaaaaaaaaaatggctggagtgggacgtgcaggtttttgcatcccaagcattaattcgccccaagctgtgttagtgccggacgagacagcttgtatgaaaatttaggagtcccggagaacaacaataacaaaaattaacmaatggcaggatgagtagcagaagggaaaatcaagcatatgctgctcgtttgaaatgtagtttcattaaaaatcttttccattgcaccctaaaacaatctgtccttgccagataacacattggacaccaaaagrctgttccctccgcttgctttcttagttgtaagccaacccttataaaaataagaacacagctgctcgtgacaaaataaatttgtcagcttgtctttgaaaggtaaaataaccagggggaactggtgctgcttcccaccacttactgacaatagtaagcaacacccttgtgtttgtgttcagtcaacaccaatcaataaacatctgttggratgagcattggtgcctctttacgattcattatgcttcattaggaattggttttgtcttcaagggaagaaaaaagaaatctcatgtaattaaagaatagtgtcttgtgctctcatattttcccccttaaagacctaaattcttttaaagccgttttttacagtacatttatctgtatttaaatgtaactactttaccttgaaaagaccatctgttcataaagaccatcctttttgtcttgccagaggtaaacttgggaaagaggtagtgttagctgggaactatggttaaatggaaatagatgagacttaaggcaggttagggaggttccctacccagcaaaatgatattcagttatgttctgggtggggtgaaaagaaaacacaattttctggagggagatgtgcatttgacatgacgttctttggaaatggttttatttcaaagggaggtgtacttgaaattcccaaggccagttaacttcaacgatcctttccttggacttattatagacaatttaagtggcctctgcagtatcagacatacagtaagttttgttattttwctttcaagaaaatatctcgcttttgaggggctgctggaaatattagtgtagatgatgaagctgtactaaagtcaccttataggcaccatgaatttgtgcccattgagggaaatatccttasgtgaacttaacaaaatgtatctaatacacgcaagtacgcaaatgaagcataaagtagctggtaatggccccaaattatacaaaacacagttactgttcccattagtgtttgtttgtttgttttgttttgtttttaccagagccaaatttggggaactgaaaagcaaacaagcacttcagagagagcagaacactgcagaggttggggtgaaattcargcgttaggattaatgaaacattagcatttacctttctacttaactcatattagagcccaaaatttgggggtttggggactgttttgtatggatagaagctttctttgagaaaagaaattaaggaatttcacttacagactgcaaccrcatacaaatgaaggaaactgaacaattgcttagaatgtgattaatttgtatttttgaataatggaatggagattgccatrggaaagaaccatgagacattcttaagcaacacagtaaatatgcgtagaacagctcaratccctttggatttagatgcagaggacttctattgttgttttccctacgagtgaaggataatttcacagagaataatgtgtttgtgcagaaaatttaatgtgtgagcaatgaacgaaacatggatttctcacatgacctagctgacctcttctttgtatatttcccaaaatatgttcattagagcagttgactgtgatgatgctcagcaaaattcgaagatgaagagaccctagtgaagaatgtgtgggaaatgttgcattcttggtctctttcctgcactgccacaggctgcattggcatctgaaaggctcccagaaatctggcagcaaataaacaactttagctttgtttaactctagcatctctcaaaagcatttgacagcaagcgcttttgttcacagagcgtgttttagcatctagcagcgttgagtgcttgtggaaacacactttggcamatgctgacctatactggtatcttctaggcttatgtaactaatggacttaatggggagtaatggattaaaagtgctgagatgccatttctgtgagtctctggggaggatagagaacttgatataaaaccacagaattaccactagaggcattgtgagaactgctggtatctgatttttggaatcgggagatgaaggtttatttcttgatggactaggcttcctgcaagagatatcttgaaggtacaactattttttttttcctttttgtgtctttttttgtttttgtttttgtttttgttttgatagcctactaaagtgagtctaaaagtgtttcttaagtagagctgagctttctgaccaccttaaagttcatataggtttctgccctttttctggccaggcctttactttatcaaaaatctacagttcatattgtgaaatcatatcraaactgtrtgatttcatcacctggagtggagagwcttggccccctgaccttggtagaggtgttctcagttaaggtcaatggtgggtacagcctaaagaaagtttgccttctaaagtcctgattatacactaaaaatgcctccctaaaaagataggtgatagttttctttacatcagtgttcctccatattggtaaaggtggaaaactgactacctacccctggtctttttgaatattactatattactcttgcttgagccctgctgtgttagatgaaaatgacatgcttcgcaaaggtattgtgagagagtatgtcatataacttgcagatatcctgattcttcttaattccttcattttccattttctaagatatcttttctccattcttttttcttttatgtttcttagwctttcttcttccttctccttttcttcattttcttcactcttttcttcctttkttcatctaatcttttcttctccatcctcccctaaarcagaattatggtagctttatatactatatgttgtattttgtagcrttctttggatctactgggcttatccaacaaacatagaaactgaggtgcctttgggagccatgctggctcttcgtgaacacctttgccaagcttccaccaacccttctgaaacagtgcattttagaattttacctgccttttatcaagcttgtaaggttatagtagtcatgcactgcataaaatttcagtcaaccacagaccgcatgtatgaaggtggccctataagattataatggagctgaaaatttcctactgccttgcaatgtcgtagctgtctttacgttgtagtccattgcattattcccttgttcatagcagtgctggtgtaaacaaagctatgctgccagtcgtataaaagtatcacacgtacagttatgttcagtacataatacttgataataaacgactatgttactagtttgtacccttactatactatacttttttattgttattttagagtgtatttattatttttttaaaaagataactttaaaaccgcttcaagcaggtccttcagggactattgcagaagaatgcattgttatcataggagaagacggctccatggtgagtgcccctgaaggcctttcagtgggacaagatgtggacatagaagagagtgatactgatgatcctgaccttgtgtagacctagactaatgtgtgtgtgtgtgttggtttttaacacaaaagtgtaaaaagtaaaaaataaaaggttttaaaaatagaataaagaaagaaaatatttttgtatacctgtacagtgtatttgtgttttaagctacatgttattacaaaagtcaaaaagttaagaaaattaaagttgataaagttaaaaagttccagtaagctgattaatttattacataaatttagaagattcatttagtatagcctaagtatacagtgtacagaaagtctatagaaatgtacagtaatgccccaggccttcaaattcagtcaccccttactcactgactcacccaaagcaacttccaatccaacaagctccattcatggtaagtgccctatataggaataccatatttcttatcttttataccatagttttactgtatcttttctatatttatttagatacatgaatacttatcattatgttaccattaactacagtattaagtgagtaacatgctctatacctttgtaacctaggagctgaagggtatagcatatagcctagctgtgcagagagctgtaccatctaggtttgtatgagtacactctatgatgtttgcacaagggtgaaatatactagtatacttctcagcatgtatccccattgttaagtaacacatggctagctgtagttagttcttttgataaagagatatttattcttatacagtatttagatccaggacaaccatatgtgagttgcacaggttatgccctacatgaaagtttctggctacagtgggacttggggtaaaatccagtccaagccacatgcttgggggacaagaaagaggtgctttctctcttgggtgccagcttctagtttttgcccaatgggaggttgaatactaagagtcttatttgtttgaatacctctgcwttgttagaatacctctgctgtaattcttcacrggctccaaaaagcaattcagcagttttatctgcaaattctagaattatctttctctggatacctttgcatgtggccatgtttacttagatgttttcaaatcagtttatcagttttatctgccagttatttctattcatccagtctagaaaggcctttaagacggtgacatactccctagaagtctcatttcccagtctgtcttggtcatcagttctcttagcagccagtttgatttgctcttgtttgatasagccaagaggaggaaattagaagttgagttcaactttctctgtgctgatctagtttcatttgttgataaaaggattttaaatatttatagttagttttgaatatcaattctaatataaatgtatagtcatgggaatcatgtaggctagaaattgggcttaattaattctctttaaaaagttcatttcaagaatcacttgaaggttctggctaaatctaataaacctaaactccagtgctaggttagaactggcaaggtctacctctcagctttgttgaggatggaaggaagttgatcactcatggatttgttaagacaaaactctttgaatatgttatgattccaagtgattttacactctagctggaagaagacacagttctgcaagaaactaagtaattcaagttgctcaacaacaacaagaaacttgtcacctcttaaataatattttcttaaagaaactgtagaaagcaagcaagaagatatttatgtagttctgtgagatttagtatataattagatatatattgtcacatayatatgcatgtgtttaaatcagatatatctcctgagtggagtctgtatttcccatacactatattttctatgmacctccatccatatatcatacttcaagctgtgttctgctagacaatttaaagccctacaaatttagaaagtaatgttttaataaaaatgcatgctattattgattgctgtcataatataaccattgttttgctaactctctgatttacatgactgaaaactctcctataattagttatttcytaaaatttaaggataatagagcagagggccacaagtgtttktttgtttgtttaattcctatgaacatgattttcccttgaataagactttgtgctataatagattttctcctaatgttaatatgatttatgaaactggtattgaatattttccttcaaatttatggcccgatggatatcatgctgagtttaagatgctgagcytaatgatattcacattggtggcattatattgatttgttttggtttgatatatagggcttttaaaaataataacacagaataattatacaacttgcttttttctgtttatgcacattagaattaagatttatgtgcagcatcatgaaattaattttataaatacctaagttcaaaactattgggaatgggtagagatgtatgttctcccttatttccataatgttcactatttgagcaccactatttgtctrttgtgatgttgtggggtttgttgggggcatgtgataaataatttccacataatcataagacttttcctctagtggatgaaacttcccaccaaaattcttaagtcactagccttctaggtaaagtataaacccctttatttttattctatgttctggaagtgtgttaaatatcccatcacatggggtaatggatgtcaatgtactttattaactaataggtagtatggaaagttctggattaatagatgattgatactggcccacgcagcccattgttcatggggaatggaaacacatgaatgtgaatggcatgtcatatctgaaatacacccaaatttcaagctaatttcaaatgttcctttttcatacctccatgcaaaggaattttctgggtctaaaagcaattttagtataatatatttgagcctttaccctgaataatatgtaggctgtttatagagacattaaccaaaaatttaaagttattaaagataaaaaccaaattgttatgggtcagcttactttcaggttgttttatttaaaacgtcattccatgcagattcttggcattgaacgaattgaaaattttagttggttgaccacatttgttctgtttttagccagctgtgcttctgttgtataaaaacagctttactgaggtctttgccaacagataatacactgttacgatgaaaaatgtgacgttttagtgacatgcatctgtttattagtttacatccaacattttaaattgtgttctgttaatttgctgcctatgtccccatggaaactttactcatttatttattcacacgctattttaaagataagccattttccctaatttgtagtaaagctttatggattgagaattcttcttggagtcaaagagctctatcttcaaaactgggattccaccactcagtcactgaattatctttagcaagtcactctatttttctgaaacttagttacttaatttttaggaataaatgaaatcataagtatgaaagttcctgatgtgatacttggatacgtgaaacatgttaggcgctctgtgaatgttcatttttcttctcatccctatccactgaatgagattcaagttctaattctgtgatatctctttctgtctctctctctctctcctcctccttctctctctcatgtaacaaaaataaaaaacaagtgaataatttgaggaactaayggtactagcatttaacctttagaattcagacttggactttaaatgaacttgagccatgagttttcgactcaatttaaaaccagaaaatatttaagactaacaatacatttttcttttcttttattattattattattattattttttgagatggagtctcgctctgtcacccaggctggagtgcagtggtgtgatctcggctcattgcgarctccacctcctgggttcacgccattctcctgcctcagcctcccaagtagctggggactacaggtgcctgccaccatgcccagcaaatktttttttatgtgtgtgtatttttggtaragatggggtttcaccgtgttagccaggatggtctgtatctcctgacctcgtgatctgcccgctttggcctcccaaagtgctgggattacaggcatgggccactgcacctggccaatacattttgcttttcttattatacctggcttattagaaataaaatattggcaatgctgaatcctatgcaaagtgcaaactatttgcttagtgtatatatgctagaaaaattgatggattcagttgttstattattatttcatttattgtgattcttattcccacagattatgtttgtgttcttgagctagcaaatgcatgtgtgaacaattgctttaagtttgaatttaatatttaaattgcaccaagaaaatactcactgttttccatcagtttccttccaaggttagaaaagatgtttacatttaaatatctccttaacaatggaaaggaagaaagctctataaccttgtagtcaacaagcctgaggattaaaccctgtcatttaggaattcattagctgtccttttgcttaggacaataataatttatctttcctaacagactccctcccctcccaaaactacacaaatgacatatttcctctttaggccattctgcttttcagaacttttgatttatgcttagagttagcagaaataatttaaggtgattctggaaagtataggtttattgtaaatagattgtattttcttttggctctcactaaactttgaacaatgaaatgaagtagctcttaagaagaaaaaaactgagaacaggcagtataaagtattttccaagagccccatctctagttgacagcacttttgctcaaaaacagaaggctgattatattccctattttagtattccttataagctctctcaaccatatgaactggctttcaagaaaaatacgttaaagacatagttccttttgttatagatatggtcaggactggcgaattaaatgttttggttcaaaagtcttccaatggaacatctctatggkgttcatttctttaatcgaaatgaattgttttctagaatgattctgctgtattttgaggattccttgagaggctgcattgatttatttgttatatgccagacaccatgctaggcctgaggattgtaggggaaggatactactctcatgtctcttaggaagcccacagttagcctgtcataaaaaaaattgaaaaatggggtggtggctgtcaagatggccgaataggaacagctctgggctacagcttccagcgagatcaatgcagaaggcaggtgctttctgcatttccaactgaggtacctggctcatctcactgggactggttagacagtgggtgcagcccacagggggcgaggggaagcagggtggggtgtcgcctcacttgggaagcacaaggggtcagggaactccctcccctagccaagggaagccatgtgggaccgtgccttgaggaatggtgcgctccagcccagataccacgcttttcccatggtcttcacaacccacagaccaggagattccccacagatgcctacaccagtggggtcctggatttcaagcacaaaactgggtggccatttggacagacactgagctagctgcaggagttttttacccgtacatcagtggatttcagataattcaaaaggcataataaagagctataagtacagcgaaatgaagtatttttttccttatggaaccaggtgttagttaaattttagtgctcagtatctaataattaagtaattaaactcattacttggtacgtgtattgtatttacatgtccctggaagtttttgacattgggaactgcttcatctctgcatttccatttccataacggcctagcagttccagctatgaatcartcaagcagtaagatcgaagatgagaaaaatggccctaatagctagtgttcctaacagctttgaatcctccaattagtcrtggtaaatttaatccaccataaggctgaacattgggaaattctttaggcctcaaattcacgattcagtcccctcatccgcaaaccastttcggacattttggctttcacgaaatgaatgaatcaagaatcgtcttagagtstcaaagatagtccttttgagtgcactattcaaatttaatctattccttgctgggttcgctgtcaggataatttgaccatttggagtctcatgtggatcttctgaaaactagtaattggtcctctctcctcattctacaaaagttggagtggttatagggatacatagtataaaacagatatgcaaaatacttttaaaaattagaaccaagggaagtgtaattaaaaatagaagcttttatygaaacgcaagaggaagaaagatgcagatgctcataacaaaaggaagaagtgtattagaagaatatagtgattgacgagaatgttyattgctttccatgaacattgttttccaaagtaccccttctctatctatcccaaagcctcaaccatttctagctataaaactgactgtcaagataatgtctccaccccagacctcttttytgaactcctaacatgtaaaacctaactcccttttaggccactccactaggatgcccaaaaggtattccaaagtcaacaaggccaccttgtgaagttgccagccagtgagtagcaacatctatctggtcaggtcagaaatctagggattatccttgcctcctgcttcctcatcttcccaaatccaatttatcagtaagtgctttagattttaccccacartatttcttaaatccatccatttctgctcatctctaccaccatcacctaatcaaagctaccaagtgtctctgatctgaactaagtgacctgttacaggttgctgcatctccattctgatctcaccatgctccctgtattgtttgtggtcactgaagtctgaacaatcacagttgtcccctttcttccacccactgtcttcctctctctcaaatttttcagtggtttccactgccaccctatgcaccttaatatggtccacctcctctctgcctttccaggtttttctcataccactctttccctcattgacctgctcgatgtgctctggctcatagctccttgaatactttatattcccttcctccatgaacctctacatatgttattatctccttattagttctctagccccattctttcacctgccttccacctaattaatgtcaacttgcctatcagttcagctctcaggtctcattttcttaaatctgaccctaccccaaatccagatctttgtcataggctcccattactttcctttcaagtattatctcaatttgtgattgcacagtaatgtcactgattgatgtttgtgctttcattagactgtgaacactgtgaggccaggggctttatctgttttgctcacctctgccccagtaccaagtacagagatagttacatggtaaatatctgttgacacagtgactgagtggagagatggatatatgcatggatgaatgactagatggatgaatgaatgaataacccgagtttcctgtcatgagatctcttacctcctatagtattgccacatgcttcatgctttgagttgtgagctggtatcctaaatcattaagaacatagatttcaagtcagaatattcttgctaaaatcttctacatacatttaacctccctgaacctcattttcctgtcaagtaaaggcaatcatgtctcataggggtagtgatggaaggggttaaatgaaacactctcttcttagtatcttgtcatagtaactgttcatggtgagacatctttaaagggtagctccgacaatgattgagaagcatcaaagaactggagaggaaatttggtagttctggtggtaatgatgattgtcatcactctccctatacacacagaacaggacatgggaccatttttgttgcattgttgtctggctgttgtcattatacgtgcaaggaggcctgcactcctggtacctcatctgtctatctcttgccaggggagaggaccctggaggtcattaacaaatgtgggtctccagcagtgatctcttcttgtttattatagtttagtctaattacttaagtgacagtcagcaccctggtacagcttttcaatgcctataccaaagcgacacatgattgtaatgacagaggttgctgctttgaatcctgatactgaaaactgagcctgaccactttatataagaggagaaagttgggattctcaggagatgctaacttattcatcccaactccaagagcaagagtgagggaagaggagaaaaaaggagagagtcatagaaggttggccccggaagagactttagtgacatctgtttcagagtagaaattacatagcggccatctactcatcattttgcaaccctagccaacatcattatttcaccaaggcattgtttactgtcgaccttgggcttcttaatacaaccctctaggtagctgcagctaattgaatggagttgacactcagtaaaaacctatttgctgttcctgattttgttatcttcccttacatgtgagatacctaattatagcacttcattatattttttcttcctcaggagagaatcagtctgtaagatggagagtttttttcaaaagaggaattgcctacctttctgccgtagcctatgccatttgagtgagacctcattgtgcaataatcaacttggtgattttttttatacagtccttttataggaatcatgtgtattaattccaagatctattaaaagaatcaatacacatgctgtttcttattatgagctaatagtttgctgaattagatgaagctctattactggggactgccacagaaaagatgatgcaactatcaagatatgtgccaattttgtcatgattttcaacactgcctactttccagtgacagatacatgttccagctagagaagggctttaatttgaagacagttggtagatgtggataatatggctacctatgctgaatatctaatttgagatcctgctcttgcatatggtatggtcaccttcagtggaaaaatacacatgtagctcacattcccacacagttacacacacattcaaacgtgttcaaggacatgttgattaaaaygatgaggctgttattttggaagtattaatctaatattctcatttctagttttgctgtcatgtctgagaaatatttgtttactgagtatggaaatgtctagtgttccatgttgtatagccaagagtctaccataaaacagtcaagytccaacatgtacaaattaagtaaacagaagtcatagagtagtatgtgctggctcctaaaggaaggtctcagatcttcatagctaatcacatttcacttcagtattacaggtgaaaagcactgtaagtgccactgagacatatttttctcagtgacttggtcaatgtgcattggttagatttgctcctgagatgttattacattcatcatcattatttcaggaataggagtcaacctttgtgcatacttaccttgtgctgagcactgggttgacacattcatccattcactcatcagtctttactgactgcattagtttttatggtagatataacaaaaatgctacagattaggtggtgtaaacaaaagacatttattttctcaccgttctggaggctggaagccaaagaccaaggtgtcagcagagttgatttcccctgaggcccctcttgtgagcatccagctagccaccttcttgctctatcttcacacaatcttttctctcgaatgcacacccctggtttctctttgtgtatccaaattccctctcttcttatacatacaccagacagactgaattagggcataattttaacttgatggtctcactttaacttactttcctctttaaagcccctgcctccaattaaagtcacattgagaggtastggggatgagggcttcaacataataatcacagggtcacagaactcagcctgtaaagctcagttcctcagctcctctgccaggtttccaggactgaaggaaacacagacaaagtccctgttctgtagagtgtaatttgagaggcagaaatggacaataagtctcaaaatcaatatttgatgaccaatttagattagtactaggaaataaaatggattaaaactgagggttagagtaatggagagtgctttaagcagaaacatttaagatgagaactaaaggatgatagggatttttgacaataatgtttactgagtgtttttcttctgccaggtagtagtttcagtgcttcacacattttgttttattgaatattcaccactatgtgagrtggctactgttcttatccccattttacagatgattaaagtaaggtacatagttttactaaggagattgtcttttttttatttttggagacagtcttgttctgtcaccaggctggagtgcagtggcgcgatcttggctcacggtaacctctccctcccgggttcaagcaattctcctggttcagcctcccaagtagctgggactatagatgcacaccaccaagcccagctaatgtttgtatttttagtagagatgaggtttcaccatgttggccaggatggtctcgatctcttgayctcaagatctgcccgcctcggcctcccaaagtgctgagattataggcgtgagccaccatgccyggccttttttctttttcttttttgrcaaataggtcttgcttcgttgcccagactggtctcaaactcctgggctcaggtgatcctcctgggaggctgtgtgctgggattacagatgtgagccaccatgcctggccagaagactgtctttagtcacccagcccctgtcagtttgactccagagctggggcttttaaccactagattaaggaagaagagtttgctgactaaagacctgagcaacacatgtgagggccctggctctacaaaaagcatgattgttccgagtatgaaaaataggcaagtagaaatgcagccaaatgatagaagaagagagctgtgccagaggatttttgtgagtagatcctggagaagtttgaagaagtatttcaggtttcatcctttattctatgaacaagaggaagccactgatggatggaacacagagtactgggatcagtttcatttgttacacaccatggcggttgctgggcagagaactgactgtggagatacaggagtggagttaggaggtgattgccgtcattcagatgagagacagtgctggtggtagaaatmaaraaaaacgtatacggttaacatatatatcacaaatgaaatttaggacctgatggcagatgttgggagagggggagaggaggtgctgtgaatgactcttakatttctggcttaagtcatggktgagtatcaataccatttaagcaggtgaggaaaaactaagtttgggaatggggcaatggagagttcagtttttgacatattgggttgagactcttctatgacttccacatggagatctcaagcaggtagtttgatatttgagtctgacaaccagcggagaagtgggagctmkggatataaaagtgtgtgccagcaacatttggatggtgtgtaaagcggaggggctgaatgggttcaatgagaaaagtgtgtcgctggggaagataagaggatatakaattgagctcttgcagtttgccaacatttakaaattggatagaagaggacttggcaatggagaccgaggaacatccagaaagaaagaatagcaggaaagaaggctatcccaggagccggtgccggggtgttttggggaaggagcagcccctttgtgccagatgccactgcccagaggtctagtgagatggggacaaaaaatgtccattgagtttggcaaagtgaaggtcactgatgaccttgttaagagctgtttttgtacatgatctcactgaatctttacaactacgctgtacgatagctaytgttgtttttcctatattacagttgtgaagactgagactcagtaatgggaacctagccayacagttgtaagtggatcagctcagctttcaaaagtgaagctggcttctccagggtctgaatgattcacagaaaactagcaaacagtactgctgattttgttttagttccttaaattgagatcagaagagtaggcatttaaattcaaagtgattaccttctggaacagttctgagttctcatctcatttctggccctagcatgtaagcttgggtttttggtttcttcgttttcaaaagaaascagttggaataaaccatctccctggtccctcctagcattytgaaaccttcagtataagaaatttytaaaaggaagccctgaaacacctctacttctcagtgctactctggtcttgagttttctggaacatgttcaacatgcattcatttagcaaagctttgattgcaagtgcctactatgtgccattcctttctaggcatttactcaggctgttcctccacctggagggcccttagcctcatcttcttttgagtttcgaattgcagattttcccaggagaggagkctccatctccttcagcactttgcacagcactccttaggtgagagttgagaggtgtgtgtgttttcccctaagttatttgtctccaaagagcagggaccgtgattttttcttcattgtgtctctacaagaagcactagcacagagcttttctcaaatgatatttgttgagttgaattatttgcaaatgatgaaagctttgttgagttctgaaagcctgggatcttcagacccaagcctgaatgaatcaggcctatatttaaacaaagcaatacaaacacacatttggaaaaaaaaraaaaaaaaacagaacaaaataacttctgaaaaatgctgggttcccttacatgattattgtggctgtaaacaatagtgcaartgcccatgaaggtttctggccttctgatttgcttccagtgttggttttctccctgctcttctcctttgcactcttcaagttaaactgccattgcttgattgagccatttcccaacttcagcattaacactggaatacaagtttcacaaattcctcccatctgggcacaaaagaagggaaaaggatgggctctgcttatgcagtttggccttgaaagcagaacactccattaacacactcaaactgactcacaccacaggcatcaggacctctcaatgagaagggggtacaccagtaggtaccaggcacacactcggggtacaggatgctacctgtttgcagaacctttgtgaaaggaggcatgtgtgcttgacccagaatgattcagaggtttttgacatgcagagaatgccagttgcagaggctggaaaggtttggtgtgctaggtgtcagcagtggttttagattctgtttggcctcttggtgctgagtgggaggccgagmacagtayttaatttatctatggcagctcaatactctttcattgtatatgttggagattcctacagcatgagttttgttggggaaaaacgaggaaagataccttgctaaagatatgtctgcaagtgtttggaccaaggtaggcgtctgcgtggcaatgcagaagagggcagcgctggcatacctggccgggaatcatgtgcggctaacatatttgaaatgggtcaactctaagtgttttgcagagccctacacctcaagaaatgtgtgcatagggagacaytcactggaggaggaggacatgcacacaaggacccaatgcacgcatgaagacagtcataaggagagagagacactcacacagagagacatcaagaccgagagagaaacagagagacagccacagagaaaccaagaaagaggtacacacgtagagacagggacagatgcagagaaagacaagaagagatagagacaggggagatttacccttacacacatggaaacacagtaacatgctgagagagacacagagccaggtacacacagatacgtacataaagacagacacaacatacgctaggggaccgagattcagagagaaacacccagacacacacttcggggggtggagagacagacacaagcagacatggaaagagagacaaatgcagagggagagaaggagtgaacccctagatttagattgtggaccattctactcaaggaacgtaggcttcagagtggctagtctcctcttcactggctgccgtcccacacagctgtccacaaggggagcatcttgctgtgatgagtgtgaccctaatggataaggacgtttttgcaccctctagccctccaaatcctaaccaggactccaacttgtgttcaaatgcagaaccagcgcttggttccaagaaaaagaaatyagacttttcagatttgttgaaggttggtcagtttaagggatctttccagagtggtttaaccatgttttcccccttactggctaacttcagagcttaataccctataatgggagggtagcttgaagtgacacctctagatgttgagcaggaatgtggcatatagactctatggtgagaccacaagccgagatcattgaaaggccatgcctctagctttggtcaggggaggtgagagtctggaagtggcgtgtcacattggcacaactgaggaatggtaacaagagagggaggagactccacagagtcagatggctgactgggagtggggagatgtctgcatgtcccgagggtctccaacccactgtgtctgggatactggctttggtggtgcaatggccacctatgttttatacctggtgaacttaatgcacagtgtgggtggtcttatagacaaactcggcaggttgttcaggaaagaggtgttacataatgtcagatttgggatgtgaaatcatttatacgatgaaaaaaatccagtgtccaaaaaattcaaacatccgcaagactaagtagctaaagtagaaggtagtgaaattgactggatatagaaggaatccaagaactttcagtcaaagctgtgggagggaccattctcagtacccctttaggtgcccaggatgagatcaaggctgtgagaagggccatcctaggaggaatttgggggaggcaaatcaaggccacacatgatgtcaacatgacaaaaagagattggcatgctcagtggcactggttgaagcaggagactattgagccaaggtggttgagtgatgttttcagagacatggagagaggagaagaccaatcccatttctcagctgtgagatgcaaattctgtggctggagagaggtgagccaggagaatgctgggctggtggggtgatgtaactggggacatctcaatgaagaggctttccatgagatggtkatcattgatcccagcagtggggaggcctgtgtgggatctcagatgccctaaagttctattgggaacttaggtatggtgtgagcaagaaagagtcagctcaccaagatggtggggtggggggcacaaggcctgatgatctcttaccaggactgagggtcccaagttggctgaagggtcagagatggccaaaggacagaggtagctgaggcatcgcaaactgatgtcagagtccttcagagttccttgtctgggtaaaagacaattagcagaaagtgctagaagatagttttataccccattttacctccaacttatttttttcttgggcgtagtggccgtggccatgaaagttgtcaactcagatgaccctgagtgttggtgtaatttagagattcccagtcaacagcaatggctacaaagtcgtggaggcaataaagcaaaaaacagcaacttccatttctgtgytatttccatgcacagaacccaggtgggttcatgrtggtccctaggaagggaacacacattagctcttccaggataatacggggttaagtttgtgacctgatgctaccacctctcctctggaaaaatcccttaaccttcctaagccttgctgtttccatgcataacacataggtaattaatacttaggttataagattgtggtgggaagtgaatgaactagtatctattaaagccttaatacaaagcctggcatgtagcaagggctcctgctgccattgttgttactatgccaaaccatatgaaagtggttagggccaamacagtgaatctcagtgatttcatgtggttcatcctaatactattactgtggtcmccactagtgactcttgtcaaattgtctcatttatgggctgtagaatcctgggagctcttgagtactcagcataaggatgatggctctcaacgttggattcagaggtgttttccaaagttgtgtagaataaaaggaacatttttgcctgttgcctgggagctttgtcccagagaacataatgtacatttccctcctggaggctacagtgaactcacctgagtttgtagcatggaagtaagacagagccattgagtttactgctcctgattctggtggagagtagtaggaaaagcaggagagaatagtaggaaaagcagaaaagaaaagaaaagaaaacaagtaaacaaataaacagtttttttagacagtggcaagtactctgactgtattaaaagaagtgatataagaggggagtgagtgatagtttcaattggaggatcggtcatggaaaggctttgatgaggagggggatttgcccaaggctggcatgtgcctgatatgatgggaaggagcaaagcaaggtcaggtggctggtacatgtgaacagggagaggaaggacaggtgatgagggcagggaagagatggggacaggtcatggagaacctgtttaatggcaattgtttttcttctccagtgtaaaaataatgaaatcctcttaactcacagcagtgacaattcttatattttatattatgctttactttagcaaaragatttgcctctgttattgcatgtgatctttagaacatgcataccagagagaagaagagaaggatggggagccagggaggagtattcatttcctcatctcacaataaggacattaagacccagaaaggccaggaagcagggctagaattgacccctatgtctccttacctctattccttctgcagttcctcctgaggcctggtcctcattagagatttaattcctttggaagaaagactgaataaagctcaggtagctcattgtttaattatgcattgttgttgtgatttgtaaggaggatagctgtttgtttaatgcaaagtcataccctgcgttccccatcagcaattctcactaattaaatataaggctagaaataggttagaggtgctaaacaattgcctgtgtattgaatatgatgttcatatgtaaacacagcccacagatcacaagttctgaaatgtrtgtgttcttaattagccaaatgtgagccccaggttggcgtaaatagaaactcctcaataaacgttagtgtgtcacagcgttagctagaagtgtggtagctgagaagaaattaatcactaacacatctgagtgtgtgtatttctttttgtaattagttatcctttccaaagtattaaatgcttaggatacatatctatcccaagcctgcgtatccatggtaaccgtggcttttgctttaggctgaagtcttatagtaactgaatgaaaatccaggtatagttgattcagtcacttggtggacattagtggaatgccagataggtgcccaaatgttagcaagacactgagtgatgacaaatcagaaatagagcctgttcatagatgagtgaggcagttagggagggccatctatggcagactcaagatagacaggataaaaggtcctatgtgaaaatttgtaaagaagttagggaaagaagagatcactcgtagttgaagggaatgagagaggatctctgaaacttaaaaagttactgatgaaggactcatatctagaagatataatgaattctcaaaactctggtatatgtgtgttctcacaaaagggagctaaacatcaggtactcatggacataaagatggtaacaatatagactatggattacttgagtagagggagaggaagaggaggtaagggttgaaaaaccaactattgggtcctatgctcactgcctgggtaacaggatcattcatcccccaaacctcagcttcacacagtagttacctttactcaggtaacaaacctgcacatgttcccccaagtctaaaataaaagttgaaaaaggaaaaaaagtctatagtattcatggaactgtggggaaaaaaaaaactttatgatagaaaaaatgaacaatacaagtagagtggacaaaagacataaatagacatttcattgaagataataaagggtggcacgtagcacatgaaaagatactcaacgtcaccagcccatagggaaatgcaaattaaggccatgatgagttatcactgcatacattaggacaatttttaaaatgacagcaccagatgctggtgagggtaacagaaaccaaatctctctgatggaaatatagaagacaactactactctggaaaatagtgatttatttattttttatttatttatttwtttttatttttattttttttagacagaatctcgctctgttgcccaggctggagtgcagtggcatgatctcagctcactgcaacctccacctcccaaattcaagcaattctcctgactcagcctcccaagtagctgggactataggcacatgccactatgcbcggctaatttttttttttttttttttgtatttttagtggagacggggtttcactatgttggccaggatggtctcgatgtcctgaccttatgatctacccacgttggcctcccaaagtgctgggattacatgtgtgatctactgcgcctggccgagtgatttcttaaaaaccaaacgtatacttatcataggacccaacaattgcacccaagggcatttatcccagagaaagggaaacctatgtgtacacaaaaatctgtacatgaatgaatgttcacaggtagtttatagtagctgaaaactggacacagtcaaaaggttcttcagcaggtgaatggttaaacaaacagtggtacatctataccatagaatattacccagcaataaaaaggaacaaactattaatacacaaaacagcttgtatggatctcaagggcattaatgttaaatgacaaaagcccactttaaaaggtcagataatataggaktcttttatatagattttcaaaaaaacaaaattggcatacacccaccattctgccactgttgccagcacatgctagtaagcatggatcctgctgccactgccccagtgaagtgctttggccagcatcctctgtcagagtgttgtttccagaagatggggaacacctatgcccctccagcacagcaggttcttaaccttgaggggcagagaacaaagctgggggactggtaccagcccccccagggttgcagcatactcccccaggagtgctgagctaagccgtggccccctgaaatcttccagaaatgaagctcatcaactgaacctcttataccataatcaaaccctcagagcatcaaataaaatcggagctaaactgaatgaaattaagacatggaaaaccatacaaaagatcaacaaaaccataaattgggtctttgaaaaaattaatcagattgatagaccactagctagactaataaggaaaaaagaagattcaaataaacaaagttagaaatgacaaaggggacattaccaccaaccccccagaaataccaaaaaactccccagagactattactactacttctatgcacacaaattagaaaacgtacaagaagtggataaatttctggaaatatgcaacctgttaagattgaaccgggaagaaacggaaaccctggacagaccaataacatttccaaaattgaatcagtaataaattgcccaacaactagaaaaagccacggaccagacagattcacagccaaattctactagacatataaagaggagctggtactattcccactgaaactattctgaaaaatgtaggaggaggaccttctccctaactccttctgtgaggccagcatttttctgataccaaaatctggcagagacacaataaaaatagaaaagttcaggccagtatctttgatgaacatagatataaaaatccgcaaccaaatactagcaaactgaatccagcagcgcatcaaaaagctaatccactatgatcaagtaggctttatccctggcatgcaaggttgactcaatatatacaaatcaataaatgtgattcatcacaaaaacagaactaaaaacaaaaaccacatgattatctcaatagatgtagaaaagccttttgataaaattagacatccttcttgttaaaaatcctcaacaaactaggcattggaagaatgaacttacctcaaaataataatgacaaatccatagccaacatcataccaaatgarcaaaagctggaagcattccccttgagaactgtaataaaacaaggatgcccactctcaccactccttttcaacatagtactggaagtcctagccagagcaatcagtcaagagaaagaaataaaaggcatataaatagcaagacgggaagttaaaccatctgttggaaatgatatgattttatgcctgggaaaccctgtagtctctgtccaaaagctctttaatttgataaacaacttcagcaaggtttcagcatacaaaatcaatgtaaaaaattagtagctttttctatacaccaacagtattcaaggtgagagccaaatcaagaatgcagtcccattcacaatagtcaaacacacacaaaaaaatacctaatacatctaaccatggaggtgaaagatctttacattgagaattataaaacactcctgaaagaaatcagagacaacacaaatggagaaacattccatgctcgtggataggaagaatcaatactgttaaaatggccacactgcccaaagcaatttatagattctgtcctgttcctatcaaactaccaacgtgacttctcacagaattagaaaaatttattctaaaattcatatggaatctaaaaagagccagaatagccaaagcagtcctaagcaaaaagtgaagctggaggcatcacattatctgacttcaaactgtactacaaggctacagtagccaaaacagcatggtactggtacaaaaccagactcacagaccaatggaacagaatagagagcccagaaataaagctgcaaacctacaaccatctgatcttcaacaaagctgaccaaaaggggaaaggactcctttttcaataaatggtgcttgaataactgactagccatatgcagaagactgaaactggaccccttccttttaatgtatgcaaaaataaactcaagatggattaaagacttaaatgtaaaacctaaaactactgaagacttaaatgtaaaaactctggaagataacttaggaaataccattctgtacacggtctctggaaaatatttcatgacaaagatgccaaaagcaattgtgaccaaaaaaaaaaaaagacaaatggaacctaattaagctaaagagcttatgcatagcaaaagaaactatcaacagagtaaacagacaacctagagaatgggagaaaatatttgcaaactatgcatctgacaaaagtataagattcagactctataaggaatttaaataaattaacaagcaaaaacaaccctatttaaaagttggcaaaggacatgaacagatacttctcaaaagaagacatacatgaggccaacaagcagatgaaaaaatgctcaacatcactaatcattagagaaatgcaaatcaaaaacacaataagataccatctcaymccattcagaatggctattactaacaagtcaaaaaatagcaggtagtggtgaggttgtggaggaaggggactgcttatacactgcttgtgggaatgtaaactagctcagccattgtggaaggttgtttggcaatttctcaacttaatacagaactactattcagcccagcaatcccagtgctgagtatatacacaaaggaaaataaatcatyctaccataaagacacatacatagacatattcattgcagtagttttcataatagcaaaggcatataaycaacctaaaagcccatccaaggtagactggacaaagaaaatgtactaaatatgcaccatggagtactatgcagccacaaaaaagaatgagatcatgtcctctgcagcaacatttatggagctgaaggctagtatcctaagcaaattaacataggaacagaaaaccaaatactgcatattcccacttataagtgggagctaawcatttagtacwcttggatacagagaaagaaacaatagacaccaggacatatttgagtgtagaaggtgggtgaagggagcggatcaaagaattacccattgggtactatgcctgttacctgggtgatgaaaaaatatttatacgaaacccctgtgacttacaatttccctatataacaaacttgcgcttaaactcttgaacctaaaataaaagtttaaataaaaaaaaaagaaaaaaatgtttaataaagggcagcatattattgcaccattcaagaaaaataaacgaaagtgtggaggtggagaacagattagtggttgtggggttgccagtcttgtaatggatggaggagaaggaacaggagtgcctccccaaaggattacaatggtgatttgggtggtaatggattcattctgtatcttgagcgcaatggtagttataccaatctccacatgagataaaatggcattgaactaactatacacacgcattgtaccaatgtcagtgtcctgggtttgatattgtactataggtatgttatattttataaactatgtcagcatagtactttgagaaactagatgaagagtacactaccagggatctctctgtaytattttgtaccttcctttgaatccataatctcaaagcaagtgtttctaaaactttaccaataaaaatgttaaaycatagctagtatttagacagtacctagtactgagtcctaggactttattaaagatttattttatgtaatgtattattaattgtcagggaaaaactatgatgagatgtagacagtggtgttgtgcctttcttacggatgaggaaactggaatctggagatatgaagtaatttgctccaggtagcagtcagtggtgtgatgaggatgcatgcacaaggagtctagttccagggctgcatttttctccactatcctgtcccttaagctgcctttggctttcagggatacataagttctgtcaagccaggatgtgagtatgatgaaggaatgatgttgaggtatagaagaatttccatggtagagtcaaatatgttctttcttccactccaaggctgttcttggtacttgagagagtagcaaagtcttcatgccagggcctcataggacaatattggtgccttttacagacaggagtaaggtagcccctgtaattagacaaggagagttgagttgttcttacttccatttgcmgttaatgattctaattaaagtgaaggttaccaagggcctctcttgtcatactccatgcaggaaaggctgggagaagggaggcatttcaagtaaagcaggtattcatgttcttcttcctcttttgtccctgaggtataatcctcctccaatttcgttgctgatttatttaaaggtgaacatattttttagtctgctccccatccagctgcctaatctctctttgagcccaggtttaaaaaaaaaattgactctgtcaacctgcaaatggtgggcgctcactggccttctccttttcaaagccctgagctggttcctgatcagcttcctgattcctattttccgttttactacctgcatcgtgcaagcacttccattgtcaggtgtaagatctcggcaaaactaygtgcttttgaggatgtgcccacagatttaatggaataccttgtttttcttcttagtaatataacaggagagcagattcatgctcaaaataatgggttcagcattctggttgaaactagctgaactatcagaatctctcaggcagaacaacctagagactcctatagagaactaggaagccaggcacagtgggtcrtgcttgtaatcccagcactttgggaggccgaggtgggaggattgcttgagcccaggagtttgagagcagcctggacaacatagtgagactctgtctgtacaaataatttaaaaaaatattagccaatgtggtgcatgcctgtagtccmagctttttgggagcctgaggtgggaggatcacttgagcctgggaggtagaggctgcagagagctatgattgcaccactgcactccagcctgggcaacagagcaagacygtgtctctaaaaaataaaaaaagaactaagggctgtaatccagacagctaagtatgggagaggggatgaatcatgtggagtcttggaaagctctgattctggaggaatatccaagtgagggtttcagcaagaaggaaaactgccattttgttttgtttaatgcaaagcctttgttctgtctcgtaaatatgccttccttttaccaacctcactcttggtcgaatatttaaccaatggtctgacaaacttgtccacaggcgtatgaggagggtgaaaatgagacctgcgctcaagctgagtttgaagcatcacatctgactacaggagtgtggggaggaggaaggtagtgtatggcaaaggcatggaaagatgaaggctaagggtgatctttgcataagcatcaaataatatgtctataggaagggcaggctgagagactaaatatgtattcacagccaggggctgcagtccagagagcaagatacggtgaaaggttcagaaaggtcagagaaaccaagtgtggagagagccttgaaatgggagcaggaagacttttgtcagggtggcgatgtgaatagttaacagggtccacccctagttgctaggccactttgggttactatagatcgtgagatgattccagttctcagggctttagaagattttactgacygtattatgggggaaggcacttgagggaaaagtctagttcacgagaggagtgagctctcatccaaggtaacattacttttccacacactaacacatttccagttcacagtgctttgccagttgagccaacccacttcatcctcagcccttatcaccttaacacactatatcctacttcatgcattggggatcattgtcaggagagagcagggagcgtttgccctcagaggacctcgtagtggcttttaccttcctctcctgggtcccttgacgcccttgcagaaatgtgcatctctctcgtgggcctcatgacatcttagtacctggagtgcagctctgagtgttatgcgctatgtccagtgtctgttatcacactttgaatgcaaagattacacagacccacaacgcaagcatcaaggcagtaaaacatcccaactctggttatataactacacagtacccacaayaggagtctatgcaatgtgtcaggataaaagagaatgtgggatatcacaaggaggccctttgcatggacagaggaaagccaagtatgagacaagagatagagaaagagagagagatcataatgtagagcaattttcaggagaagaaaacagtgagaggtgggtaaaggcatttatattccaactgtatccttgctactttggctggacctgcattgtggctcatatgaagtctgtctgatccaccctcctgccccttttgtgtcttcacagcagagcactgttaagggtagttggcagcttgagaacaatcagcatacactattgcatacacaaaagaacatgtcttcaagttttatttctgttattactttgaagaattatacttcctagttttcagcctaatagagtttttgcagtctcttaacattgagttagagatacttcctgtctctcctttttaactcattcatttaacacatacctattgggtgcctactaagtgctagtcatagtcacagatgctgggatcatggccgtgagtatgggaacaaaaaatgaaaaagtgaataaatgcagattttaatttgagataggaccggaactgtttatatgtaatatagaaattggggaagtcctctctatggaagtaacacttgagcagagatctgggtaaaagtaactagaagagcagcttacatttataaggcattttctaatggtgccaggggcggtgctaagaggttttcatgtattatttcatttaatcctctcagaagccctttgaagaatagactttattatctgcattttataaatatagaacccaaagaattaagataytcgactgccttcacaggtcacacaggaaatgaaagttggggtggggatttcatcccagctcatctgactttagagctcgatgctcttaatcaccaagctccacttcctaaggatttgtaccccagtgggagaaaccctcgttctctgccttccatctccctcccyaagcaaagtttttcacactgtgttctttggaagctccagggtttcttcatgcccaggataagtatattgactccacattagtttttaggagaatggttcttctacctgttcccatttagtaaattagacttcagtagartaatttttaaaacaatggtaaagwccttaagagaaagttaaattaaaaaaataaattgtgaattttttttaactgaaagatgttgtggtcaagtagcacagattttgtggttaagtagttgtagtactaataatcgtggcagcggcagcagcaatgatagctgcaaacaccttacatctatgcttactaagttccaagtactagtctgggtattttgcagtactaaccaatttgatcctcacagcaaccctctgagatgggttcattttacaaacaagaaatctgaagctctgaggtgttgactatctcaggtcccacagctggaaagtggcaggactaggaattaagcccaggctgtcaagctgcagattctgtatattgtcatcccgtgacctaaggttaaggacctgaaccttccatgtcacttagcttaaagtgaaagctrtgcttgctgtgaaatcctgacttgctggatgtatgaccatggagcgcactttacacattcatgccagctagaggatgtctcattaactcaaccttacctgtgacactccctacctctatagactttttgccggtgagggtgtgacatttctctggagcaaaacttgatacccaaattttatatccatgagcctggtatggcctgttttatgttactaattttaaagaattgattgttggctaatcaccttaatgagttaagcctgagttggctgtagccagggctcagcagtgtcctaagccaacgcctagaagacacattcattttttcacatgtcaagtacacacttagccttcaattggctttcttgaccaaatgttaattccaaaggttaaaaggcatagaaaaatcattataaactattcacctcacctcacctcctgcgccgcaaattytgacccacaccttgagggagcatccatgctgaaagttcctaaaaggtctccgccactgtaaatttctgatctgtggtgagattcctggcaaattggagttgctattaagactctgctgcagttccctctgttagtgtagggtcctgactaaatggtatgatgcagtgtgtcttctgttaatggccagtctgtgtgagccacggagactgaagttaggaagggttccattctgcactgaaaaagtttggccagcataaatcaagggcctcaatcactgatatcacccagaaaaagaaasatgatcaatttttcatgtaatttctggctggtacctatggaatcactctgtctcattgtacaacagagtatattatgagaaaaatgagggttggtgctggggcttcccccactgtctgttgcctcttttattgttattgctttagcagtattcatcgtttgtgcctcaaagccaccagacagggccccataaatctctctggctccctgtgtggaagccaggctgagatgatatgcagctctctgggtgctcccagcaccatcattctagacccaaaccgagatatgatttaggaggtccccataaaactggggctcaktgtcctaatcggagtcatttatcctgtcttaagctatcaaatcagagctcstgggttgtggggagttagttagggggtggtttttctagtatattttacaatgtatattttcaaacttattttgaaaagaatctcatttatgaagggaatgtgctttttcgttggtttttaaataaattttattgtgtgtatttgaggtatacaacatggtgttaagacatatatacaaaatagtaaaatagttactataatgaagcaaattcacatattcatcatctcacatagttactcacttttttgggtgtttgtttttgtgacaagggcaactaaagtatactcatttggcaggaatcccaaatacagtacagttttacctgcagtcttcatgttgtatgttagatctctagactggttcttcctacaaatctgctgcttactattctctgacctgtatctccccattctgccctcccaacctccaccgcagtytgataaccactgttttattctctatctctatatattttactttaagattccacatttaagtaagatcatgtsatatttttctttctgtgtctggtttatttcacttagtgtatgtcttccaggttcatccttgttggtgcaaatgacagaatctcttaatttttaaggccgaataatattcattgtatttattatataccattttttaatctgtttgtcctttgatggacatttacattgtttgtatatcttcactactatagataatgctgcagtggacatgagggtgcagatatctttacaagatggtgatttcaaaggtaatatggacttgtagcacatctgggtagaacccttgcaaaaagttgcagctccacttggcagccctgtaggttgagatttgccccatgctggaagaggatgtcatttttaaatgtgtgactttgacgtaaatacctgctcacttgagttagaaggaaaatgtaacccttaaaaagatgattctgcttaatactttgtaattcaggaatgtcaagaagcaacaaagcatatgtaccaagagaaaagcaggatttggattacactaaattctatttrtgccgaatgttttattttgttgaagtcacatgtgaaaatagcaatattgaatgatgaaaaatcttaaatttagcccctgttaaggagaataatgttcctttgaaagattttgtagtaacggtcaaagcaaggagcaaattacttatagcaaatcatawaatggkgggagaargagagcttcactttggaactcttagctccttgctccaattcccacagtaaacaacagcacagttttaaaatgttgcacgtgggcccasagatatttattcacactaaagaaacacaacttctaactacaccaaaatgagtccctcctgacgatgtttaaataaattgtgccaacccaccaataaagcacgctgacatgtcatgaagtgacagccatcacttttaacacatttcatcaccgctctgcagaggctgactatctgtatcttatcacactgtgaagggtcctttgttccttcatttctcctggcatctttttttctctctagttaaacaacccagccatggctgttggacaaagaaaaaagaaatatgtcatcatgttttagttatttttaaaagcacctgctttttagmacacaatttgcaaagattatctgaaatagattaaccttttaaagtgataatgacataaaattatgtaagtaattttcctaagaaataacacwctgaaaataatgtgtgacaccatcracataaagctcagcataggcttttgtctgaattcagttactttggggtgaccgttttaatcaaaccatttgtctgtctctacatccaggaatgtccataccacaggtatcttgaccttccccaaatttstggttctactttctggtttctttgttagcactggaaagagaattagcacaagcttgtccttcatggmtgacctctccaggtttcttatcacttttatttaaaccagatcttagaggcaaaaaccacagtagtattgcgctcagmtagtgagataattagraagtgctgtctccataattactatgttactgtctctggagggacatgaaagcttgtcctgtccctttaacaggacaagttgctaattcccttaacattttttcccctttggactgatcatatttcacaaattkttgcattttgaaatgttttaaagggaggcttaagcaataatgcacagattatggaaatgatgctcattaagtagaaggcagatttctgaaaaagccacagagctgcctcgaaacatgtaacctccattagaggcttcactcgaatgtttattcatggagcagtaaatgtttattattatacattttattgaaacataaattaaagaactgtaattatgtgtatagcaaacagtaaagcaatgtgcatttgtcacaaaatgagtaagacaaggaaaaatgctatcattgtttcatttgcatccaaatccttttttgtgtacccaacagaaaggcacccagagggaatcactctacaaattaatgttctgayatgatgtataaataaaaaaatagatattcttcatattttgtctaacaaagacagcaccctggaaataatttgtaaagatcagaagatatccaaagaaaggttaggtttcttcttctctcctgagagagaaccacagtagctcttaatgaagttaatactgaagaacaaatatatccccttggcaacccttgcaatgctgactgtttttaggataagctatttctccagacacttgagcatatctgaggagttttttaaaagggatttatgtgaggctagaaacacaagaacttcaaacttacattttggtaaaaagatacttttcaatggggaagaaaggtgtgtacaatgtgatcataatggctcttcrtagaccatatctttgtatgcacaagaactttcaagcaaaagaaaatgacaagaatggcgaagaaaatcagtgcatatwtttcttcttttaagcaagctaagaaattaagagcagtgwagttgtctattttttaaccatccattcatycatccatgcacctatctgtccacattcccactcatgtacctagctacccacccatccacccacccactcatccatctattcatccatccacccatccattcacccatccatcacccatccaccccacccatccatccattcatccatccattcaacatttagaaaatatgtcttctaacctaggaacctagggttagggaaaagaaataatcaggggaaaaataagtaataaatagcccagagttccagactagtggaagagaaaacctgtaattacttatactttgtggtaaaaagctgtcatggacatatgtataatgaatcagaaaagcctgaaagagtytgaagagtacacaaaggaggtggcatttgagcatgctctttaaaactcagaggaagaaaaggaaagagaaaggaactccacatggaaggaagaacacttataattttttctaccaagcacatgtactataaactccrtgactacaacaacagctgagaagcacaagggtgacaaatcttgaaacatcctctgtatctcctaaaagtcattttgaaactttcatacgttttcagatggagacattrctaaggcactgtcccttcccacccagcagcaagcagaaccaattttacaagaacctytgagctcctgcatgtctaactgaacaggaagactctatcttggaatggtcttcccagggttctacctgtccataacccaaggcagtagagatgacctcatytgagagccctacatctggagttatcctggttttatagctgttggttaggtttgtcaacttctctagaggcagtgattataaattctactgayatggtttggctgcatccgcacccaaatctcatcttgaattgtagttcccataatccccatgtgtcatgggtgggaccaggtggagaaaattgaatcatgggggcagtttcccccatcgtgttctcatgatactgagttagttctcatgagatctgatagttttataaggggattccccttcactgggcactcattcttctccttgctgcccccatgtgaagaaggatatgtttgcttccccttctgccatgattgtaagtttcctgaggcctccctagccaggtggaactgtgagtcaattaaacctctttcctttataaatcacccagtctcaggtatgtctttattagcagtgtgagaacagactaatacatctactctcttctcattaaatagctttaagaatttaaagctgttatgtcactgaaaaccaatcagaagccaaaagataatacagaatatttgtacaagattgatctcaatttgttagaagtccattctctctaatgggcccctcttgcagaagagcttactrtcataaggttgaatagcagggggtgcaggggcagtgggcttagaacttttactaggctgtgttcaactgtaccagagtgttgatagtagtatcacacttggatgttggaatcgggcagacctmctcattccacrttcctcggccttagtttcttcatctataaattaatgatgataataatttggattatatctatcatgcagttttatgataaataattgagatcttacaaagaaagtgcttagctcagttcctggcatatggtgcctggcatatagtaagagcttaataaatagcaacagctattaccgttgcctcttgtgatgataataagtaaagaatgctcaactggagaggtttctagcatgcttgaggttttttctttagagcttgaggggccctgttttagtctaaagtatttcttttccctcccagagctctactctgaacatgttggaggtttcatgaaaggtattgatagataagagttagtagcccattctttaaaaactttcacagagccttctttctttcctttcttctttgtttttcccctgctatctgcagatgagaatagttagaatgagcagaaataaaatttcctggcatgaactatactactagttagggagaccatataatttattgtccacagcagaacttaggagagtgaaagaagatgctgtttgttattacactggcctgttcatacctgcaggcctaaagctggatggttccaaacagactggggcatatggtcacccagacattagttatttactcaggaaggagcatagcaaaatacagattacgcttgacatcctatcaacctgacttagaatcttaactcggccacttttgccagcttggtgagcttgcacaatttatttaattccagtaagcatcagtgtgcttactgaaaaaaaaggagacaacagtttctattttttagtgtttcggtgaggatgtgataatatacagtactaagtaccattccaacatataatattcttatgtaaatggcagcaagttttataactgataatgacttaaaaatggtgggtggatgaatggtgtgctattactataaatacgtaagtaaagctttttggcttatgtgaaagaaataattaagtgttgtgtcagtattctctttatagagaagaagaggactgaatttgggggatttatttaccagcccgtgaaagaacccacatttctctagatgcaaagcctgcctcattcacatctttcaactgacagyctcagaatagtgggtgatgcatttatttccatgtctttgttamccagattatatagttaacttactactacaggagaaaagaagcctgggacttctttttgagacagccattggttttctttggtggaaataagatgtttttgccctttggaagtggtcaaggagggagccgggtgcaaaatatctacagtaatttgggacttagaatctactggaggaagcccaaggagcaaaaaattagagataggagaatgggagggaagactgttaattccttatgcccagatgtttccctccacatggcagtaactactcttattcttkcctttaattcacttagtaaaggaaaatggaagaagccacttgaagtgtaatcgtctctcactgttcctgtttaggtctattacagaaacagtaggaagatttctcattttgttctgtttattgcagtaggatttaaaaaaaaagggaggagttctctcaacacctgttttcttaattgattgtgattactttgcccccaaaagtgagtggcttttaaacgaagtgggtacattctcwtaagccacattaccgtcttataaacccatcgttaaaataggaaaggtgacagaactatgacaacagctccctttcctastctggatgagaagcccatatgccattcccctctttctcctcatctgcaatcaatgcttcctttgctttacaaagacaaatgctagacaaggcatgttttcttcctacatgccctgttttgagtttgagagcaatgaggaaggaagtctatctactttttatctgttctttttgttctgaatctcagtggaagagctctttaaaacaaaccaaaaaataaaaaataaaaaataacttctcctgggtttatccagtgcctatcacagcattttatgtgatccagtctttgggatgaygatgagctactcaggcttgcagtgtggaagatgggggaaattgattggcaaaatggatgcattgacacttgctcacctctgtgctcatggaggaggaattgaagaagaacttgccaatgatttccaccttgtgagctcaaagccaaaaggaaaaggcatatacccaggctctcagagttcagtgacactttatatagcatcacattccattatcttgctttttttttacttgaaaagatcttaatttttgaaaatttgaaatttaaagctgtctggctgctaaaagctcctttaaactctcattgtggcttggagcaatacatcatcaaagccatggtgcttagatgatgtatggcacccatatatcaggagatcaccatccctcttatgatatattattataactcacaattggagcaccaccagtgatgtatggcttaaaaacacaattgttaagccacgaaactcaacagagtctccacaaattctaggaggtgttttctgtttattttttttgtttaaactgaatttttttttattttatttttttcctcgaagtttcccaacttgattgggacactttgaacacatgaaaagcactatgtttcctctgtttcctgaaaggcataccaactgcctgagcattgctaatattctaagtgaaggagctcattgacagtagcatcagaaaccatcagtgtgcctgtgcattttgacaggccactaatttgattcttgagttgatcatgctgaggtatcctcaaagtcctgtaagtggcattacttccagtgacatttattttagaactaagtggctgtcagtaatttcatgctgacccttgactcgacttagttgcagaagatgaggcctccccaaatcaagaaaggcaaaatccagccatgtagaacacacagctttggggttggtgatggtctggatgaagtagaatacattcagcaaggctcaccgtagaattaagccttctggtttagaacagaagcaggttgtcaaaattatttttaaaactaatgtcctgtaatatagtcactgctggaattgactgaatattcagaatgtgcagcattagcttaagcactttacctatgtatttcacataatcggtataaaagtcttatgcgttgggatactggttttatgcccacttgataaatgarggaatatgaaagaagttaaggaattgactcagtcaaaagaataggtaggatctgaaccttggccacccatctccagtgactgaacaccaaactgcttaattgtaggggcttctacctttctgagatctgggaaaggtaggttgggcaagatgaggtagaaagcactggaacacaagtcagggtttcggggttctcaaggttccagtcccagccctgccattgctttgttattggtcttctaaaagccactctcctcttctgtgaaatgaagaaattaatcactcttaccaccccccaacgtttcctaattctaatcctagtagttttcaaagattttctgtttgtttgttttagtaataaattctttttgcaaatgaaatcgtgcatgggatcccaacatagaaacagataaaacagagctgctctgtttgaatcacrgagggggaamtgaagcctgccgccctttctggtgccccattcttacttccatcatgagctgctccttggccataccaggcttgttctggaagctctagggctttgggatttgcagtttaagaacctctaaccagatctttatctgtctggtatctcacccatgaaaaggagactaaatacttgaactttcggttcagcagcaaattatgagactccaggtgtcagaaatgagacagcactgtgcaaagcattgctacaagtggggtctgtgctctgcccacattgtgttacccccacccaccatggctgcaatgcatcctacctagcctgacttgcatctgactggccctggaaacctggcttttctcwctctccaggtgggagaaggcaraagtgctggagtattgatgtctccccaggagcagttctcaaccagtgaggacaaaagttggtgtatgaatacgctagttccctcacaccttggctgggataactctgggatgcatattcttcactggktctcagagttctctakcaggttttataagctccagtcacatgaaataataactcacttgatcacacatcctatattggcmtcctttcctttcttgtttccttcccttactcgtgtttccagggatcatccaccaaataaactacttgcactctcatccttgcttcagggtttttgtctggggcaattgagactaaaaaaaaaaaaaaagcgtgtatcatatttgtatcactctacatgaagaaaaggattgttattgcttggtagtgagattaactggtgatctaaattttctcctatgtgtttttctgtctcttccagattttctatgctgtaagtttttgatgttgatattcagcaaatggaaacaatcttattgttacattacatttggttattccaagttgagagctgttggtgattatacaaacatagaacaatagatgctgggcatgatcacstgaggttgggagtttgagaccagcctggccaacatggtggaaccccgtctgtactaaaaatgcaaaaaaaaattagccgggcatagtggcgtgctcctgtagtcccagctactcaggaggctgagtcaggagaatcgcttgaacttgggaggcagaggttgcagtgagccgagatcgtgccactgcactccagcctgggtgacagagtgagaccctgtctcaaaaaaaaaaaaaaaaaaaaaaaaaccaaaaaaacaatacgtgaagatttctgagtcttgctgagggaaaattttgtctcttccttacctataaaattggtagaataatacttcatacaggtgttgtagagataagaaaaatgtgtaaactatgcattaaaaatatcaaggcatctgtattcattctctacttgttgctataacaaattgctggaaacagtgcatgggtcatatggtaacattattgttaaccttttggggaactgcagaaacttttctaaagcagccgtaccattttacatctgcaccagcttgtacaagggttccaatttctccacttccttgccagcatttgttattatctgtcctttttttttttttttttttttttttggagatgaagtctcactctgtcgcccaggctggagtgcagtggtgcaatctcggctcactgcaacttccacctcccaggtttaagagattctcctacctcagcctcctgagtagctgggattacaggtgtgtgccaccatgcctggctaatttttgtatttttagtagagacggggtttcactatattggccaggctggtctcgaactcctgaccttgtgatccacccgccttggcctcccaaagtgctgggattacaggcgtgagccgccgcacccggcctatctgtcctttttattacagttgccctagtatgtgttaagtggtattgtctttgtggttttgggctaaggatgttgagcatcttttcatgtattcatttatccatcctctttggagaaatgtctattcatatcctttgcccattttacttaggatttttgtctttttattacttagttgtaagtagttctttatgtattttagatatacttcccttatcagataggtgatttgcaaatcctttctgccagtctctggcttggcttttcacattcttgcttgtggcctttgaagtagaaagtttacaattttgatgatgttcaccctcttccagttttaaggactcctgatgacattggggcaacctggaaaatctatgatacctctgccaatcttaaggtcagctgcttaataaccttaattcatttgcagccataatttatcttttgtaacttaacataatcacaggtcagggattaggtcatggataactttgaaggtggccattatcgttttaccacagtatcgtctgttgttctttagaatcagacctgccttctgcagttgctcattggcacatgtgagggagaaggattcacacagggccaactggtggaggttgcaggacaccagctgtggagcagggtagctcttcagccttccttgctctttcccccgccatgagccatgtttctatcccttagaattgaattacaatatattctgacaaggaaaaaggatatcgatacaaccacactggcaatcctcaggtgagtatgggcagaagagatgtgttcaaagagatggtggaaggagcagagacagcgcagaagaggcagagcctctaaaaatgatggcattgcatgctgtctctatttcacctcctgcttgctctgaaacccactgcagttaagttttgggtttttgttgttgttgttgttgttttgagacagagtcttgctctgtcacccaggctggagtgcagtggcacgatctcggctcayggcaacctccgcctcccgggttcaagcgattctcctacatcagcctcccgagtacctgggattacaggcatgtgccaccacgcctggctaactttttgtgtatttttagtagagacggggtttcacaatgttggtcagactggtctcgaactcctgacctcgtgatccgcccgcctcggcctcccaaagtgctgggattacaggcgtgaaccacagcacccggccttcagtttttttttttttttttaagtaatagctttattgagatataattcacataatataaaagaaaccctattaaaatatacagttcattcttttagtattgtcacaaagttgtgcaaccatcactgctatataattccagaacatatccattaacccaaaagaaaccctgtgcccattagcagttaccctgcatccctcttcacaaccgcaaatctttctttctctatgaatcagcctcatttggctttttcatgtaaatggcatggtacaatatgtggccgtttttgtctggcttatttccctgagcatgatgctttcactcagcgcacatcactcctttttatggccaaatcatatcctattgtcttcatatactgcactttgtttaccattgatcagttgatagtcatttgagttttttatactttttggtgattgtgaataatgttgctgtaaacatttgcgtacaagtttttgtgtggacatatgtcttcagttgtcttgggtatgtattaggatcagaattctgagtmacaaggtaactccatgttcaactttttgaggaactgccaaactgttttccaaagtaactgtgtgattttacatccccagtagtgtaggagggttccagctctccacactctggccaacgcttgttattgtgtgtcttttgattattgcctttctagtgggtatgaagtagtagctcagtgtggttttgatttgcatttccctaatgactaataatgtggagcatcttttcatggggttttaaattttgttctcctagccttactgaaacaattcaagctttcaaaaacatttcacaccgttagtgatacactctttgaaatttgttctctgggctgttggaacttaccctctcttgattttgcccctttccttactacagccttaaattgagtcctgcttctcttcccaaacttcaaacgttagagtggcccagtgctcagtatttaccttataccgttatgtttttcttcaggacacttatttctatccaaaattagaatgtatagtcatttccttacttatcttctgcatcacccattggaatataagctctatggggacagaggctttgtcttgtccattaccgtatccctggctcctagaatagcacctagaaatagatatttttgagtgaatcaatgtatactttagaaaagtgtacagaagtgttacatgaatgaaacaggaaaatcaggactccacaatcaaataagtttctggaatgctggattagatgaagttaaacaagcatcttttgtgtggaaattctcatactttaatgtgctaatgagcattgtgaaatgttatttgaccatgaaaacatttttggtgtggaatgtgtcatgggactttaaaaagatactcttctagctcaagcagctcaactgcaacccctagcaaatttgtggaaggcttttattaaatagatgttttgttggcacttagaaaagtaagttgtgatcaccacagcttaatatgaaagcagtaagaacagattatatcaaattatcctcatctctgctattcatagcgtttttatcagaatgtcattctattagaagtccatagtgatggtattttttcacagcaatgaggctttgagctggctytatcgtgatttccctgttctgagaagctgagtgggttgtcagcatcgtgtgatcagcctgtcacttaagaatttatgtcacgatatcagggtgggttgagatctatgccctcgggaaaaaaccacctgtacagtgagctatttacggtttcagtgtgtcacggcgaatttcaagtggttaccagtgatcaagagtggcttttctagaacttagtggtaacacagcctatagagatagccctgaactaaatcgagaagacgagggtaaagaatagtaggcaggggatagacctggaccctggaggttcccaagtgcaggttcgcaaccccccatatgttagtagtggatactaacaggcatattcctgaggaccacgcaaggagagtggtcagagtgcagaaagccagagaagcattcagaaagatgtctccacatactggacatagtagctcacacctataatctcagctacttgggaggctgaggagaggggattgcttgaggccaggagtttgagaccagactgggcaacatagtgagarctccattgctaaaaatatgaaaaaaagttagcttgatgtggtagcatgcacctgtagtcccagccatttgggaggctgaggcaggaggatctcttgagcctgggagttgaaggctgcagtgagctatgattktatcactgtactccaacctgggtgacagagtgagattctgtggggagagagaaaagaaggaaaggaagggaaaaaaataggaaggagggaaagaagaaggaaaagaaaaaagagaaaagatagaaggaaagaaggaaaaaaaagaggaaaaaacaagaaaagagacaaagagtctacacataatgcagtagggcaggcaaaacagcaagtgacctcmgtgcccacactggcagaagcaaggtaagaaaccaggtggatattgtaagccagtggttctcaaagtgtggcattagaccagcatcagctgggagcttgttagaaatgcagacttttagggccctgcagtctgcattttaataagccccaagtacaggtggaagattgagaatggctagtcaaagcaacagaaatcagctttcacaaaagagatgcttgaacaatgccctcattcaaggagcttcttaatatctttattttatttttttgctggtgcagaaatcaatccctgaatgtgatgtctacttgatcttcaggtttaartttgtttttttaaataataaaactaattcttgtacagttctaggtaatgagtactaactacatgcaaagctgaatgctcagcacatggttagcagacttaatcctcttaacaaccctgtgaggtagcaaccattataatccccatatagataagatactgacacatagactttgtgagacaaggtcacacagttagtttgtggtaggtccaggatttgtgttaggaagtttgactggaagacactggtctggaacttcctagaatgtataagggagatgatgaaagatggatggatgggagggaggaagaggggaagaaaggaggagggggacagaaagaagaaaggacaaaaagaggagaagaagaaaggatggcaggagattctggaattaaagagtgagtgaaggctccttctaagggttgtctgtatccttgttctacgttattttcctggttttgcttttaagtcagcccatctggagatttcagtagatttcagcccaggcccacctgcctggctttctcctaagaatttggtttcatgggtagtttgtgatttattttttccttgtttgttctttcactttctctctccatgctcacgtaatctttgtgactgaagtgcacacttggcccaattgctgagagatccgtgactggctttatcattgactggcgaatattctggcaaaagcgtgtcactctttgggaactgtgctcaggggctgctttgaarctcctctctgcttcattcaccttggaccacgttgcaccctgcctcggctttaatagcgtgtcactttccccctccttgtacagcgaagccacagggacacttaaatcttacgttctcttgaggccttttggagcctcggaacccgatcgcagtaatcaggaaggggtgggtgatcagggatgaggtttgaccctctgtctgcctctctctatttaagctcttcattttcgcattcctccccacggtttgtaataaaagtggaacatagctcaagggcagaaatgaggtttaacttcagcsgaggtacaatagaggctatttggaaagtaaaactttcaaatagcagtttagctttgaagaatatattgaattagatatgctctgagccctgattcaccatcattgcataatagcattgctatgtatattacctgggtgctttaktagactagagaaatgggctatttaaaagattaagttcgcagaatcagtgcatgtgctaatgaaacacaggagccaaagccaggcaacctcatttccggtgctgacttttacttcctgtggcgccctgtcctcaccgaacattgatatcttcttctgtaaagtggagatcatagtagaccttgcctcacgggatttttttttttttttttttttttttttttttgaggagtctcgctctgtcgcccaggctggagtgcagtggcgcgatctcagctcactgcaagctcygcctcctggtttcaggccattctcccacctcagcctcctaagtttttgtttttgtagttttagtagagacggagtttcaccgtgttggccaggatgatctcgatctcctgacctcgtgatccgcccacctcggcctcccaaagtgctgggattacaggcatgagccaccgtgcccggccacctcataggatttttaagagtactaaatgaagaatgccaaacacagagctttccttatcataggaaataaatgcttactaaatgagaactgtttgtattactattatatgattatttttcgaagccccaagtctgtaattctgcccatactacttgctacctcattcactcgctctttacttatgcagktctctgttagccaattcttatttcttgtcagtttcagagtcatgatggtcacctttgaagatgcactgtcatttcaaagcactggctaactacaaccaagactgacaaccatraataattccacagagactctgaaacactctagcatttcgcaccaactctcatatataccccaagttgttctctcttgcttagtgcactctcttctcggcagatttcaggtatagttaccgaaggtggatatcaacktcctctgaaaaataacccagcaggaaccatcgtggagtaattgggcttcatgagagcatcactgtcaagtctaaaaatacatggggagataatcacattttttttctttcttgtacattttcagcacgttcacgtccaygttcttcccaggaaggctggagactttcacaggaatgacagcatctatgaggaggtgggtctgttctctctgatcttattgtttgatcacggggactgtcggtgggatgacatcaacctaatgaatcaagtattaccctagatatggtctgaaatggaattctatttagccagacttggaaagtggcaatagaggccaaggagtcaagaatggccatcgtgggaacccatgactaattaattataatgattttctttttcaaatgaaaaccagcagaaaccaagtgtccttgtgatttctatcctgtcatttaccaggacagtaaatatttgcatggagatatggcccagaatctccatagaagaaaacctacagtgctaccactggaaatcaagcagattgatatatgattcttttagtcaaatgctacacttaatttttaaaacactttggaactcagcttgtctttcccaacagcatttattcaaagtgaaactktaaattatcatgagcaaaaactaggttggtttgagtaagtgtaactcacatatcataaatattaaagcagttaatttatttctaagtactcccattcaaagatacaagtgtgaaaccactacaaacatgaaccagcaagagccaggtgatctgcgcctaaagccctgtctacatgagaactttcagatgcccatttccaccttgtggagcatacagcctgtcatggatcaggctgttataaggtgatttcaatttacctgtttattgtagccaaagaggagaaagtatgtcccccacayggtagagcagattagatagcactagtgccctggagtgattggttaaatggactttgaggctgtttgtggatgcaaggaaaaatgctgtgattgattagcaacgcctgccaagggcattggataggaggtaggtatcatatttgccgtctttttgacattcctgttctaactctttgagaatgctttttaaaacacattgtttatctcgattgtttatcatgtggctctatcaaataaaccacatgattatctctaccttgtttccagggaccagttaaaatctatgcatctttttgtgtgtgtgtgtctatagggcttctttgcagtgatgaaattaaaacagcaactcaaaccctgaaaataaagaacaataggtcagcagttaataatgaaacgtataattaatgtttctggaacacattggattccgtgaggtggctggttattctgcctttaggataacccttactatcttttgctttgtatgttttccaagagctgtactggatgtgtgtagagtggaaatagtctagtcaccagtccctaagtgctgatttgtggaccagttgctgcaggtctcaattcccaggaggtcccgtcgctggagattctgatcaagtagattgcacagcactcaggaatcagtcattgtataaggaaatccccaggagactctgatgcatgactacctttgggaatagsctctctgggttttacaaagccattttctrtaaaactataatttgaactcattttcgttggatgtggaatgcagtttggggattgataagggcttagttcacattggaagaaaatcagaattatagagtaattataaagagatgtaattaaaatacaaataccaatctcactaatgtaaactaaggttaatgttgccaaatacgactgttttaatgaataaattagcacgtgaattatatactagtaaatactgctaaagtagcataaaagtgcttgaaaacactgtttccttaggctgaacagtcaccttgaaatcttgtcgatgttccaactgtgcttaaaatgaagctgcatggttacttttcagcccagttcaagacacaatgtacagtgctgtggttggtgtatggcctctctctcctgtcttattcctttgcccttgtctgcatgctctgatggccccacagaaaagaaaacacatgtttctacttcccacattttggaggatcatctcaggagaagtaattactgtgagagtttttctttttttaaaaatcagtggtataagtcatatgtagtatagacagtatccactaagggaaattgtggtacaagactatgtagagattgaagtctagaaacaggcagaagtaagttcaaatcccrgtggcatctactaaccatatgatattgtagcctgaaaggcttatttcagggcttggtacttaccaagaatttgttaatagatagtagtttctgttcttactgttattattactatttttctttaagtagcaatggttagtaaatagagaaccagattcaaagccaggtcattggatgttcccayctaccattctttccaagggtgagattcccaattttctctttgcctttaaccattcattctcagttttatcttcctctttgtatggaaatgtttctccaggctgagtatctaataacacagtgtccagaaagaggcatgaaaagcatgcagtaccgcacaggcattattggaatagaacktaatgtacattagaccaaatgatcttaatcagaagcgatggagtgatgagggatggcattctttatattgatgggagcacttgctctagattatgcatctgttcaggacattcaacaaacagactgccttggagggtgggaggtaggaaacaggaacagcaggagactgagctccataaaatgtaattgtatttctactgctgcagacatagaaaattatgcctaaagaagccccagagtataaattggctaggaacattgtgttctttctaggcactgttttaagatggttagtgacaaataagaaggttcataagaaaggtggttgggtctgaaaacagatttggagactaattgatggtgggaatgttttgcctggaaaaaggaagacttgtagagggaagatagtaacagagtcactgtttccaaatatctgaagggctggcaggtggaaagatattaaatacattctatgtggctccagagggcagatctgtgagtatcggactacaaagtggcagatatcattagctctccataataacgggtcaaagtgaaaaaaaatgaacacttaaagagtgccttccaagggggtgagcttcccatccctggattcactcaagcacagagcacatggccacaattcttcaagaggatatctacatttggtcagtgcatgggccacttggatttgtggtgcctctctttacacatttgacccatttgatcattaccgccattttcaggttttacaagttctgtaacaaatagtggggggttttttgtgatcagtattgcaatgtttgggtgactgcctagtgaaacatattgttttcattgttaagttcatggaaataaaaggtaaaaccttttctttttaacttagaggaaaccacactgtatttatttttttctcattcccagcctacttcctgcttttcctgcagctcagcattgcatattgatggtccttgggctttgcttgcctcttcacatgtgttttatttttgcctgcaaagtatttttggtgatttgctttattgtgactgtaaagtattktttaatgagtttgaatgctgttaggcatattgctcattctctakgcctatacagttgccacgactgccttctacctakgcttgcttcactggctaatggtgcatgcatagctcctgaaggcattggagtttaagatccttgcctatttcatgggctgctcctcttctctctgctactcaaagattactattccccaggatcttctgtctggtatactgggcatgctgtttaactgaaacatctgtttaatctccctgcctattcatttacagtgctctggccccaggtgagtttttttttgttttttaacttcaagttctgggatacatgtgcagaacctcctcaaagggtccttttcactgttctctgatttcatctgtaatagttaatcctctgtcccctctagagtaactctactatatcgccatacctatttccttcttaacacctcccacacttgacataatttattactttattattcaatacctgcatcccccaattatgtgttacagtctttagrgcagggatctaatctggcctagggtggaccttcagtgaatatttgaaaatgaatgaacacatttaaaaaaaaacaaggtgttgaactagaagaacctgaaattctctgctagttctaacataatttaaaaggagactatatattgctcttcagacggtcaattcactaactcatagccacactgggtgagacttcgacatggtgycatcagccatctgaggtgaatttaatggggcattgatggaacagaatcctttggtcagaaatcagtgtgcagaaggctacaaattgtggtactctggaaaggttagcggaagcaattataaaccttgtctgattgctaagcaagtctgataggcacatgtcgaagttgataactaacttgccccctcccaccaaacctagatttgtgtggtggctataacaaatacagatgtaggatttgctgaaagcaggctcgagagctactcttcctttctttccaatcttgattatcatctctaagtttgttttcaccttctgttcctccagcagtatgtcttagacatttcagagtatgagcctctcttctgtctcaaaactgagctcaaactctcccccttccaaagcagattgtctgctgaagctcttcctttgtggttgtctatgcagatcttatttatctgtagctcccaaactctttctacatctatgttctttaaattttcatgaattatgccaagccttccctgaactcaatgggcccttcattatcttgacaagttgatgaagattatggtaatgacccaaatgcgtccttagataaaagagtgtgtatagccaatgtgggggaggaaacacccatggcctaatgtcatatcatttcattaactcagtaagacttaccctagctgtatcccaaataaccaactctcataactgtattggacaattcatcaaatgcttatgggtgacattgaatggttgtgactgtgcactgtatataaaacccattactgatgaaggaagtgactattactaaagcaagtgggaatagcaatcagcaattggacaaattcaaccatgaatttcatagacaaagcaactgtgggttcaagcatgtcatgggaaacaattgcttggcttaacacaattcatgagcaaaatcaacttgctaaaatgcaggccatttggccctgagggctggagagaaccattatattgctgatgatatttrttgttgaacttggatctctttcacacgscatttgacaatgggctcagagtccatgggtccctagttgacttttcaaaaaggaaggaatgtttcagtgagacagttaattagctttttgtcttctgggtttactgatgtcctcccactgagtggtaagtttctgggtatttcagaattttggaatgaaaactttggtgtctctcactcagaataagataacaacttgatatgttcttctaaattaatggagactttttattcaaagaaccagatgtgataaaactaacaaataagcatatagtaatgctaatttaatgacctatgacctcaaatgctccctctgtatctatgaatgctctttgactacctattttagtaatgagaaagctgggtaagcatctggkttaccctatcctatgtcagattattactgagctaaatctctatgttcctcaaaagagagacacamaattagcagaaaagcatttatctggttaaaagttatttgtgcccatttttctcacagaaacaaatattcagataatataygtattagtgttctctagcaggacagaactagtaggatagatgtatatatgaaggagagtttattaaggagtattgacttacatgatcacaaggtgaagccccacaataggccatctgcaagcggaggagcaaggaagccagtccgagtcccaaaatctcaaaagtagggaagctgacggtgcagccttcagtctgttgctgaaggcccgagagcccctggcaaaccactggtataagtccaagagaccataagctgaaaaacttggagtccgatgttcgagggcaggaagaatccagcacaggggaaagatgaaggccggaaaactcagcaagtcagctctttccactttctgcctgctttattctagccatgctgacggctgattagatggtgcccaccaagattgagggtgggtctgcctctcccagtccactgactcaaatgttaatctcctttggcaatatcctcatagacacacccaktaacaatactttgcatccttcagtccaatcaagttgacactcaatattaactgtcacaatatatgattcaggttagtcattttattaactctttttttttttttttccctaagagacagggtctcactttgttgcccaggctggccagcagtggcccaatcatagctcactacagcctcaaaccccgggtctcaagtgatcctcctgcctcagcctcctgagtggctaggactacaggcacataccaccacacctggctaatgcttttgtagagacaggtctcgcaatgttgtccaggctggtctcaaactcctagcctcaagcaatcctcctggcttggcctcccaaagtactgggattataggcatgagccactrtgcccagcccaggctagagctgagcaaatgaggaatgttgagaagcatggagggctataatggtagtgatggtgagctggagcctccaaggaagatcatgaagtcattggacactaaagaggaaaagtaatgaaagaaggctgaagagtgcttgatgaggaggatgcaggtatctacaggttgagcttcaaggcaaaggatgccatggctttttcctagagtttgctttgaggtaagccaccctagattagtttcccaaaattgctctcctatgttgtttgaatacgttcaatcgcatgttagtgagaaataagaaaaatttaatcacgtgtcactctatccatagcatccatagtaaatccactctatcaaaccactccatgtggtcctctctcattatttcacgaatcaggctttcttgtgcagagtcctatctgccctccacagtgaattctcgctccaamcagatacattccatcagaaagctctaaggtgcttgccggtgaaggaggaaaatgcctcctccgaggtgtccttgttgctggagtccatctgtcttcctacctgcttctcacagttctgctctcagtctcacagtggctgctgcaatgaaacctaagtttaactacagtgcttgaataatgggctgtttcrgtgtttaaaaaaatcttaggtttacattcaaggttcttgacatagctattaataaacagtcacttaaaattgtccaaaaagttttgataagtttggagttaacctgctaaagcaaactaccaagacctcagtagtttttccaaatctattttacttagagaaatgagagtatagggattaaggatagaaaaaaaaaaagactattggaaaaataaattatgatcagaaatggataaactaggtaaagataaaacagatatgaattaagcattgacacgattccctcaatataaattataatggccccaaagtgaaaagcccccaaacatttaactttatctctcttttaatgaagaaaatcaaaataagcaagaaktagggggaaacagaagataaaaattaatacaattttaaagtcccaaagcatttgtaaatgttttyatttttaaattatcacctgtcattctttagacaaaagaatgatacacgtaattcaaacaacctgtataaataaatcccgtaacctcttagcttggagcaaggttcattcatgtgccacatgccagcaggaaggaatcctaaggcctccaagttgcctgcttttggagacatagagtcctggaaacatagcctgatgtttagaatcccggcttgagtgttcaaatgtggttatatttttgtcactgcggggtgacgtctaccattaatgttsaatttggtagcagctagccacctgtgmccagtctgaattgagatgcgttgtaaatgtaaaatccagtttggatttcaaagcyttctaccaaaaaaaaagtaaatatctcattaataatgttttataatagttacatgttgaaataatattttggtaatgttgagttaaaaattatatcactaaaattaatttcacctgtttctttgtacttgttttggtgttgstaccaaacacttttaataacatatgtatcatgcattagatttcttctggatggttttgctmtagaatgctttcaaactgcttcagcttactggcaagcagctgtttgtggagactgwtatsaccttccccagatttagaataggaatttgaatgatgccagattttctttctaatcaaggaaatcaagaaatagctggtatacctgtgtagctctaaattctctccaccttgagtcaacatagtgrtttattgcaaactgtttaatgtttaacttgctatttaaatctcagtatcttatgtttcccwtatttaaaatgggggaaaaatacccaatcatactgggcttctagtgtaaggttagtggtcataaacaactatagttcgcagtctttgctcctagggagagcactaatgaaaaataataatataatacaattattattgtcattgagaatacactgagactagtaatacatctattttaaataaatgtaatatttgagaataataatcaaattattactgtcaatgagaatacacattgggctggactgtctgctaggtgccaagcatatcattcataccaytgaattgaaactaaatttgcagagagtaaatatctatgtcaaaacctcataaccagctcatggcaaagcttgtttatatcaaagtctgtttgactacaaagccgtccctgtttctatcaccctttgctttagcctaaggaaaatattatccttcaattttatggaaaacccatgtatagggagaaaagcgattttcttagacactgggacttccagtactaaatcccaartggttttcatatccctgttcaaccttagagacatttacacacacacccacacacgacacacaacacacacactggatttccaataaatttataagtcctagacacactaccagtaatttagacttacagtgaaagaaatgacattttacaaagtcaggaattttctctgcttttaggatatggcccagtagtccccatctaggtactttattataactcctttttatagtttttgttaaacacaaggaagtcatcaacatgctctagccaagcttctaaaattcccaaggtcatccttttggagctggttttgtgtgctgaaccacttaaatacttttgcttgccctatagtgtattcatgtcataacacactaaaatatttaagagaaaattgctttttttctgaaaaagaaacagtcttgcttacaactcttaatggaccataaatatcttgtaggccagttgcaccagtacctgctggaaatccttcttacattagtggtaactaaggaactcatagaatattccctttgcacggaaatgtaaccttgctccaacatatattttccctctaaaaaattgtttcttctagtaagctcttcagagttattgaaagaacattgcacagttaggtcaaatctatatatgaaatttcactggcttctctgttaatcttggccctatcagttgatatgaagactgaggctgaatttccttttagcgactctaaaaaattgtttctcttagtaagctcttcagagttattgaaaggacattgcacatttaggtcaaatctatatatgaaatttcagctggcttctctggtaatcttgaccctatcagttgatattgaagactgaggctgaatttccttttcgtgacctggaataaacaactgcacttgttttcctaaattattttccatccrcatgcggtgtctaccatttaccttctttccctggggcattgggctagtttcatctattggtgatctgggataaggctgaattggactccttgaaagaggctggaaacaaaattttcattagttggagatacctcaaatgtggagggagactgtgatatgataatgacattagcatactgatgagttagtagatacaatgaagtgctcatttgggcattaaggtacatttatctccatcatgtgtagaaacggaggcatakgcagacttgaaaacttttctgaggacacasagagagtaagaaacagacctgagattcatacttaggctgtctggctccagagtctgggttcttttctctctgctgcctttatgaactaccagaggcatcttactcatcttcatcgtctctgcctcccggcacccaaaaaataccacttcataatagagtaggttgtcaagaaatgactgttgagctgaacctggcacttccccagccccctgcattcaragcctggttctccgaatcctcaggtccgtggctttcctttatcagctgcaagtctccccacttcttgggcactgcctgcctcctgtcaaaacctccccctgagaaagaacttttacctcagttatyacaatagtagttcaaaktgttgtccttcctgagatgccaaggtattttttcaaaccaacaaagcctgctgagaaaagaatgggattttaaagctggaatatgaggcttagtctagaggcacagtggaactttgtgggtaactccagaatcaaatcaccaaggccagctctgtcccctgtacccgtttctggaatctccctgaaaattagcttgataaattgctcccctaaaaggcccaccagtactctccaagatagacaatccaaaataggctggtcaacacacaccttcatgtatggaactgtgtctacacccaacccagagaataccaggcatytstgtgtcatcccctctacgttcaaaatgctctyacctgcattatggttccagtttacatcagagtgtgtgtgagtgtgtgtmtataaaacttggacawctgatctaattaatttgaaaaatctaaacctgggamacaatttaaatgccaaataatagaggaatatatttaatactatatattcatctatgtagccatcaaatgagtttttatgaataatattaatgatatmacactgtacacaaataatcagmccaagaataataaagcaaattagtcctmccatgatttatcattagtaaaaatgggaaactggagagagaaaagttatatttcaaaaactgtagtayacctgttgttagattctagtcttgcctgtttttattattttctgtggtttggaatgaattctaatttttctgggctacaagtctgcaaaacaatgttttcaattttttttccttcttttttttcccatctttcctaatttggagtcaccaaaaactaagctgtgctttcgtaaagccaagtgaactgaagctagacaacggaaacttcagaaaaagataacagcaacctatttacatacataagccactttcatacctgcctactgatgtatggacttcagagtaatatggcctatatggattttacaggcttgttcttttgtttgttgttgttgttttttccttcctccccctattttttctttatagaacatgagacttacaacctgctaaaaatgaacatacctaataactcaagacctacccatctaggaataagccatcctagccatgagagatgagacaaaacctgagaccagagactcattttcttctaaaatgcttcctccaaaagattttttcaaagagaagggggggaaatgtgaaaggaaatcttggggcccccaaatcactaagctacagggaaaagtcaagctgggagctgcttaggggcaacctgcctcccattctattaaaagtcacccctctgctcactgagataaatgcatatctgattgcctcctttggagaggctagtcagaaactcagaagaatgcaaccatgtgtctcctatctacctatgccctggaagctccctccccacttagagtcttcttgcctttgcttcaagttgtcccatctttccagaatgaaccattgctcatcttatgtatgttgattgatgcctcatgtctccctaaaatgtataaaaccaaactgtgctctgatcaccttgggcacatgtcctcagaacctcctgaggctgtgtcacaggtgcacctcctcagccttggcaaaataagctttctaaattcactgggaaaaaatacattgggatataatattgawtggaaagagtggcatataaatggagaatggaatggaagcacatgtaccttgaaattaagagagattgtagcttcaaatagaatgttacactcctgttcctttcttcatattctcttgcatttcccaaacataatataatgagtatgcaataatttgataatgtgaaggaaacatcaggggtcactttttaagagcagacatcctgtgttctttttcattcattggcagaagccaatatttactggcagttgtttggtgaacctagtgaaaaaaattgactttagttttgatcaaaacctcatgggaaatacatgtgtgtgtgagctarctaagtagctgaaacacccaaagaggtgacttttttggtatttctactctttgacttgttagaaaaaaaaataaagatactccctgggatagaggcggacggatcacttgaggtcaggagtttgagaccagcctggccaacgtggtgaaaccccgtctctactaaaaatacaaaaattagccaggtgtggtggtgcgtgcccataatcgcatgtacacaggaggctgaggcaggagaatcacttgaaccccagaggaggaggttgcagtgagctgagatcatgccactgcattctagcctgggtgacagagccagactccacctaaaaaaataaaaagtagggccgggcgcagtggctcatgcgagtaatcccagccctttgggaggccaaggcaggcggatcatgagatcaggagttccagatcagcctggccagcatggtgaagcctcatctctactaaaaatacaaaaaattagctgggtcgatggtgcgtgcctatagtgccagctactcaggaggctgaggcaggagaattgtttgaacacggcaggtggagtttgcactgagccgagactgtgccactgcattccatcctgggtgacagagcgagactctgtctcaaaaaaataaaaaggaatataaataaataaaaataaactagccagttgtgctgatgtgatagtctacagttttatattcccatttgttttgtcttgtctccagtttcttctcaatcaccaagtcaactcttgctgtgtctgaggttcatttgagtgccaagtataacaatgattactttcacagtcaccagttggactattaaaaaatgaaatgttcttgactcccaaagttcagttgaatttctggctgtgaaagcaaaccatctcatcagccctgggccaggttttgctcagcaagttcagtgccgtttctgtcagttcaggcctgtaattcattcagtcatattctggcttataatctctcaattcagattctgtattctggggccttaatgagcaacatgtcgtgtggggtaggcagggattctgttgtccttggctgttgtttccttggcctctggtgtccaagtaatccactttgcctggtccttgtgtgcatctttggtccattctgatacccgtaaggaatgccatcattctttgcaggatggtgacctttggcctcctacattcctagaggtgtccatggtcctgacatagtctcttgtcacaagcacatgaaggacacttactctttggcctttgccagcttgtcagagttcttctcatgggctcaaaaaaaacttgtctgttcttacatactttgctaagacctgmaggaaattaggtgcctccagcagacattcatgttgctgctatagtccttcattattctctttgcaaagctgtgtactaccagaattctggatggaaaaagctgaatgcacattcartctactcttagagtctcaaattcaaagggatggcttgcagtgagtcagctgtggaagaccaaataatagcctcccaaatggtgcctatgtaccaatctttcagaacctgyaaatatgttagatggtaaaagagaattaaagtagaagattcaattagaggctagtcagccaactttaagataaggagatgaccttggattatccaagtggactcaatataatcacagaggtggaagagagaggcaaaataagtagtgtcagagtgatgcaatatgagaaagattcaactggccatcaatggccttaaagatggaattgagccataagccagggaattcaggcagcctctagaagctggaaaaggcaaagagcctccaaaaaggaatgcagactggccaacacctgaattttarcccattacacccattttggacatctgacctccagtgctgtaagataatacatttgtgttgttttaagccactgagtttgtggaaatttgttatagtagcaaatagaaaactcatatattacccaacctcaggattcagcctgggggttggggaaaaggcaagggtagagcacacccygccccagtgcacacatgcacacacatgcatgcacgtgcccactcatgtacacatgcactctttcttgctttatctctcttgactctgtccattatccagcttgaaactctattttaaactctgggggtgggcagttagaactcttctgtgtccttatccctgcatgaatcatttctctctcacactggggcagcgccttttgaattaaaggctaagctggtgagtgaaggagactactgctaagcaatagatgcacttccctttagccaagagatggtcaggaaggaaatggcacaccagtgattactttgaaatattrgcctgctacacatgggtaagaaattagtgacagtaactgtgctacaaagttgaaaccgctaagtaacatgggatggtggtctctgataaaggsccatgraagtgtggggaaggaagtgaccacctgatatggggccatcagaaaggcttcctatcgaggttcaactcctgtccctgtggctaatgagactatgggcagttccctctgcctgaggctcagtttcccttcaaactgagaggtattcatcatggtcacctgtaagcctgctttcagctctgatactttgtgattctatgacactaaatagttcaattgagaaagaatcacttgccctgagaactcctttcctttgatttccacgtggaggtcacattagcatagcagaaagggtattgacactgcagctgacttttaaaattcactgagaataggagataaaatgaaaacacaccagatggaatgtgagctccctactatttcaaaacttagacatttccactaaatgttggcacaaacttaaatatcatcttgaatgctatttacagttttcaaagtgacaacartagcatcattcaaaagaaggaaagactatgtgaagagagatcctaatatctttggaaattttttatggatggaaattttaagagaataattaatcagatacgaaaacaataggctgggaaaatcacgcaggccattgagatccatctgtaactccaccactaaatgcmtagatttccaggaaccaactccacagaagcagtatgaatttggctcatttcatgcagatttgctaaataggtttcaatgtttttaatttttaggggtctacatgctgtggttctggatccactttgtgttacagactcctctgaaagctttgccataaactggcaacttcctaatgagggaaatttttaatatatttacacagatagcttaaaaatgcatttaattttaggatttttaagggccacattaagaagccccaacttgaaaagaatgcccttgaagtctaggaaattacaaagactgattttatgcaagaagttttataaacacacacacaatcaaaaaatagttttcatgtccttggggctatggtgtccattcragctccagctctstgtattcaagagcaktgtactgtccagttattctcatagagcaaatgccagagacacgcaatgccagaatacacaaggaggaaggggtcttttgaaaaggaaagatccattagacaggatagtgaacttcattagggagccaataattgmacatgtctgatgcctgaatctcttatctttwtaatgaaaagtccagtcccagaatcacacagtaccttccagaaaacaggccatacagttttacaaagcactgttatttgcatttctgaggggwtttttttgtaaattgacttaatttccaaygcattatgattatataatatcattcaagtatagaaacttacctatgatacatctttttgaggtgctaaatgtctttaagctgtgaacgttgacgtttttgttcttctgtcacaggaggaagttacgtattcgggttttctattcttttataggcttttctggattttaagtgcaagatgactcactgtggctttataatatctaagagacagcttaaaattaaaaaatttttaagtctcatagagtctattgactccacagtggttgaaacaaaaccattttttaaaatctgagtttattgttaccatcatttgttcatatttaattaaattttatatgcctcatccctcctgcacacacctataaaaggcttactacrtgagaggcactaggttaggtttatacagacatacgaattcaagggatgagttgctcaaacttaatttatctgataacagagtgcatgcccttctaccataaaatgttcccctattctgacccctggtcttactggtatcacccccattctgaaaaatccaggctagaaactttgggtcatctccagtttattcttgaagttcgtcctctgtatgctrtcattctctagttctatcaattcttttttcctgycaagcccctgtcataattattgctattcttggctgggctgaagttctgggattgtactccccagggttttctggggcttcaccaaggtttccaaattgatagcaacaggaggcaggcaaatgcctaggcagataggggtgggtccccagtgaaaccccacctcaagtggaagagagtttaaagcctgaaagccaagctacaagttaaatcctcagactggattgagaatttccctttctgtttggtaagctctcctctgattggtccccacccttcacctgttttacatatacctgcgctttcctaattggttttctacactgttgtgcccacctttgagtggtgtctttgctttagacttatttgcagactcacaaacaaatcagcaggcacttcccattctaagtctggaaaaggccccaggcccagccacacaggggaactttctcaccttcaggtagggagaccaaatccatatcccctcttcgctaaaaactgttttcgtcactcagtaaaattcttccctgccctcctcaccyttcaatgtccagtgtatcctcattcttcttgggcatggtacaagagctcagggaaccaccaaacacgggtacaagctataacacaagaagctggagcacaccagcatggccaagcaaggcctggtacgggcatcactggccagggkttcccagcttgcaaagtgactgagaagaaaaatcctacatcaaaatcatgacttcagtctacttgtytcctgattgtggggaatattgaagggaaatcccataattttgtcaactcaaatactttytccaatctgtttytgacagttgaggtggaagattttgatgcaacttcaaattgcatgaaaatcatytcctatttgctttttcaccttccctcgstccttcctgccttcctttttttttttttaattagtttcctcttttgaattttatggcacaagtttgtgcttaattccttatttagagcttactggtaaatttccctttttttttttttaaccatgattttatggttattattgttccttttgttaggtgttgatgaaggaggaagggagattttttttcttctgtattctgtcacctttatcataaagaaatagcymctttagaacaactggctgtccgggggcggkggggtgtgggggagaaaaaaaaagaagtagccactattttgtgctatttctttcctatttccattcttattatctttcttcaggccctaactaactcatacttcctgggttctgatttcagccagtcccttttgtaccacataaactggcaggatggctttccttaaattcagttcctgacattccaaagctggaggaagcccaaacatcttggcctatgcttccaagacccttggaaatctaactttgccttctcttcaacttatcccttgcattcatgagccatttgcttaatcgaattgcctccttatggctctcacagggaaccaaattattcccaccttttcactttcagattgctgcctttggtgatttctcctttgcctcctcctttattctgtttaaacttctcgagggcttttctaactactccaggctacaataatcctcctcttctagacctcaccacacatatgtttgagtattttaattctcagaataacaggggtgaaaagtctctagaaaaaccgactgcatttttaaaatgcaggtgaatgaatgataaccgtagtgaccatttttatttcttcctttgtctcagacatgaagctaagaactttccatatagtaacagctttatttagatacaattaaaataccatacagttcacccatttaaaatgtacaattcagtgatttcaggtatattcagagttgtgtaactgtcactacaatctaattccagaataatttcatcacccccaaaagaaaccctgtgcctattagctgtcactccccattcctccccttccataaccctggaaactactaatctactttctgtctctatttgcctgttatggacatttcatataaatggcatcatacattatgtggtggtgtgtgccactgtcttttccatttaccataaagttttcaagggtcacccatcttttggcatgtatccgcacttcatttctttttttacagcttgattaaggtatgattcacaaaaattatatatatttaagatatactgtgtgatgatttaacatacgtatacattgtgatatggttaccacaaccaagctaattaacatatcctttacctcacgtagttaccttttgtgtgtgtgcatggtgagagcagtaaagatctactctctcagcaaatttcaagtatacaatatattatcattagccttagtcaccatgccagacattagagtgccagcacttacttatcttataactgaaagtttgtacccttgaccagattattcccatttcccccatgcctggcccttggtaactactattccatgctctgtttctaacagtttgaatattttaggttacacatctaagtaagatcatgcagtagttttctttctgtgtctggcttattccacttggcataatgtcttctagttttatcatgtttttgcgaatggcaggattttctttccttctttttaaagagtaaatcgtattccattattgatatatacatcgcrtgtstgtatttatctgtcagtggatacttaggttgatgccatgtcttggtggttttgaataatgctacgatgaacatgtgagtggagatatctcttttggatgggggatttcagttcctttggttctatatycaggagtgggattactagatcatatggtattctatttttaatttttgaggaaactctgtactcttttccataatggctgtacaagtttacatttctaccaagaagggttcccttttctacacaccctcagcaatacttgttatcttttgactttttgataatggccatcctaacacgtgtgagatgatacctcactgtggtttttatttccatttccctgaagattagtgatatttcacattttttataaacctgttggctatttgtatgtccccttcggaaaaatatccatgcgggtccgttgctcattttttaattgggttattttacaggggagggtactattgagttgaatgggtttcttatgtattttggaayttaatcccctgtctgatatatggtttccaaatatgctctcccattttgtaaattgtctcttcactatgttgcttgttttctttgctcttcacaaacttctttttattgctaaataatattccattgtatggctaggccatattttacttatctgttcatcatttgatagacagttgagttgtttctactttttgcttcttatgaataatcgttctgtgaatgctgctgttaatattacaagtgtttgtgtggatatatgttttcatttctctagggtatataactaggaatagaatttctgggtcataaggtaaccctatgtttaatttttgaaggtacttccagaccattttcaaagcagcgttgccattttacattcttaccaatagtgtaagaagattctagtttcttcataccttcactagtacttgttattttgtaactttttattatagtcatccgaataagcaataagcatgaagtggtatctcattgtccttttgtttgggtgaggcatccctgatagctaatattgagcatcttcccacatgccccttggtcatttgtatagcttctttggaggaatgtctattcagattctgtgcccatataagttggattttttgtgtttttattattgagttggaagaggaattttccatgtttaactcgtaatcctcaygatacctctcccgagattggcatacttacctttgtcttgcaggtgaagcaattcaagttcagattattcactcatttacccaaggtcccacaggtaggaaggatcaactaaagctgaaattttaaaacctagaatctttccaaataccttttccactctcatattcttcactatttcactcagaaagtcaaacagtgaagagtaaacatgacactaagacatgttagaatattaaagttcagacaatagtttagaaatgagcagacttaatcctgtgaaggaaaacaggattaaatgagaacagaaacaaaagcataaagacaatgggaggttacgttaacagacaaaacagtaagaaaacttttgcttctctgcatcctgttggtcatacacttggaagaaatataaacaaccccaaggttatcatatcaaagaaggactgcatagattttaaacagtgtggcctggccgggcgcagtggctcacgtctgtaatcccagaactttgggaggctgaggcaggtgggtcctttgaggtcaggagttcgagaccagcttggccaacatggtgaaaccccgtctataccaaaaatacaaaaagtagccaagcatggtggtgggtgcctgtaatcacagttactcaggaggctgacgtaggagaattgcttcaacctgggaggcggagcttgcagtgagctgagatcgcaccactgcactccagcctgggcaacagagtgaaactccatctcaaaaaaaacaaacaacaaccaaacatatgtggcctacaacaggagccaccccgtcttgggatatacacatggtaatgagacatgggggattcaagtgcaaggagatagctcagtgtgaagtggcaccagggatggcatctaggggagtcaaagcaggcacaagggaaggagaggtatttagttttgtctgtatcaatttaagcatctttgtttggcaacttcttggatattgtaggcctatcatctgtggactttgatttagtcagaggagccaatacatcacgtggttgaaggccatgtagcctcacctgttctgcggacaggcctgcacaactgctgggaggaaccattcatgggaaagagaggctcactctcctcatgccctgtggggtgagtctggggctggagccaccaagaaagtctgttgcttaagtcattcttgctgtccaggcctttacctcagaggactgtggctaccagagtggggaatccaacaggctgcttcatgctttgcccctggtgattgtgccggatgactgtgaagagcctctgctctgcctccatggtgcctagcacaggggttgtgggcaaacgatacctgtgggccctggcctakttttgtaagtaaagttttactggaacatggccatactcatttgtttacctatggccggcaaagcctaaaatatttagtatctggacctttatagaaaacgtttgccaactcctggcctggcagagtgctaggcctgcaatagctgattcttttttttgtttttgttttttgagaaggagacttgctttctcacccasgctggagtgcagtggcaccatcatggctcactgcaacctccgcctcccgggttcaagcagttctcctgcctcagcctcctkagtagctgggactacaggcgtatgctgccatacccagctaattttttttttgtttttttgtattttagtacagacggggtttcgccatattgcccaggctggtctcgaactcctgagctcaggcaatccgtccgcctcggcctcccaaactgctaggattataggtgtgagccactgcgcctggcctacaatagctgattcttaaaccttccattgacttgcatcctttcaatatcacctaactggcacgaagctaggcaagcctcatggagccaaatttgtattagttccacaaagacatgctctccctagatgagggctccttgagggtgggtgctagcaaaagccacaaggccattatttaccttaagagagttcagtcctttccatgcctccctactccagatgtgtcagcctttgtccagccattctctgcctgctcagatgagatcattttccatttgtgaaaagtgtctgagaagttcagtgtttgacctacatcatctcatgtgcccgcatgtgaccctggaggtaatgtcagctcttatttctgaagtccattgtgagtggaggagcaaaatgcagaaaggttatgtcagttgcccaaggtcccactttgtcttgtgctctgggtctaaatccaggctgggaggaacatggaggagtgaagagggatgtcrccttgtaatgaagagatggcagtgaggactctgatggtgggcagactaggggaagacctttctgtttgttttcagcttgccccttagcatctcactatcctcattgataaaatgaagctaaggctgttttctaggtcatggaggaggattctatctgacaatgtctattaattgcctagtataatacctggcatgtcatgttcaataaatactaccagccattattattgttgtttttgcagctattattgtcactgttgttattttactaatgtcggtgagaaatcaatgtctgaacttgaaatttctgtctcttcattcattgtctggtgttgtaaggtcacatggctgcaggagaaagacagagaccataaatgacaacagtggactaaaagtaccaaaaaaagaagaaaaaaaaagattctgtagaggatatttattatctaaatgatgcagctgcttgttacattctagttcattgttgccaagcccaaatatgggactaaaattgccagatctaatatttgtttcaagaaatgttggaaatctgtttttaacattggtaagcagtgtctaccaaatacacacacacacacacacacacacacacacacaaacatacacacgcacacatatatacaaatatggtgaaatactatcaaatctgaaggtcatacatattgactgccccttatctgaaatgcttgggcctagaagtggttcagttgtcagattttttttggattgggaaatatttgcgtatacatagtgagatatcttgggaatgggacccaagtctaaacacaaaatttgtttatgtcttatatggacctcgtacaaatagcctgaagataattgtatgtaatattttaaataactttgtccatgaaacagagttttaactgcatttttactgtgacccatcataacactacatgtggaattttccagttgtggcatcatgtcggtgctcaaaaagtttcagattttgggctgggcaccgtggctgatgcctgtaatcccagcactttgggaggccaaggcgggcagatcacaagttcaggagatcgagmccatcctggctaacacggcgaaaccccgtctctactaaaaaatacaaaaaattasccaggcgtggtggcgggtgcctgtagtcccagctactcgggaggctgaggcaggagaatggcgtgaacccgggaggcggagcttgcagtgagccgagatcgcgccactgcactccagcctgggcaacagggtgagattccctctcaaaaaaaaaaaagaaaaaaaragtttcagattttggagcatttggagcatttcagattttcagattagggatgctcaagctatatctggtttgcagcttcttatataaatggagtaaaccttcccctgggaagaacttttctggtaagctgtgcttatatttgttcatgtctaaagatggcttcattatttcacttgagcatccaacaagtatttatcaaataattctcatgtgccaagcacggaactgagtatttagagatgagtcaggcagagtctgtccccttgagagattcttgatgtagttggaaggaccaacataccataaaatgattgtaatagaatgtgataaatggttatcattaaagccatgaaacctgctatttagggaacaggaagaggaaggggattctggaggaagagacatttgaattgggtcttgaaggacgagcaggagtttgcagactatagggagggtgtctagagctgtgctgtgcaatttggcagcctgtggctaaatttaagttaattaacattaaatgctttgcaaaattcagtttctcgatacagaagcaatagacagtgcagaattagatcatttccatcattgcagaaagttcttttagactcagctgtggtgtaaataaggacacagataccccaagactatataaactttagaaccctgcaagttttggggatgttgytggagtgataagaactgcagttggaaaggtgggtgggaggcagaccaagaggaactgcatgtgctaattcagcatggtttgtcacagcctctgactttgcttgactctacatgctaccatcaactcaccctcccaatcgttgctaacatgtttctggcttctttccttgttgcattcagatatatcacgtggtccaaaaaaagcaacattacacttgcgttatgttccagatttcgtcagtaatgtcatactcgtattcttgcctctgatactgcttgtgaatattaaataccttaattattttctttcacagtaataaaaattataaaaggaaaacacacttaaatttattttcatgccatgctggtccacactgctgaaccatatttggaaacttacaaaatcattgctatggttatgtattaagaattagtaaaattatttcattatactytcattatttcattgtctctttgcttgtaacagatttaaaaatataggatgaactttaatttagtactcataaagagaacgagggagatttatactaacaaactgttaatttaatttctgagttactcttggtgctagatgaacactaactaccctctattattctgattttcagtcttatgttgaattgatcgcagttaaataaaggatgctatttggagtttaatttgaaaattctaggcaactcttttgtaagtgacagttaacacatattttcttttagatgagttcttttttctctgactagttcatgtatatgaactgtttatttcatcgatttattcctcagttatctattcattcaacagatgtgtattgacttcttacattgtgccaggcactgtgcttgcttgggacacagcagagaacaaaacagtcaggttctctgttttcatgaagctgacactccagtctgggagggatgccagtgtacaagcgtaaatgagcaaataaagctctcagattgtgcctcataatctaaagacaagaaaacttgtctgactacacaggtgaagattctgtgcagtcaaaaaatttctctgacgagttgactttaaaccacttcctgaattatgtgaaagtgccagccatgtaaggatctagatgaagagcattcccaggccagtgcagaggctctgagaagcaaaggaattggacaatttggttaaataggaagatgaccgctatgattgtagtgcagagttgagcaggtgccagactttgtaagatgttttaagcccccgtgaggatgttagcaagttttaaacacaagagggatgtaatctgattaacgcctttaacaggacatatggttattgctctgtggagaatggaagttagaggtcaagagcaaaagcaaagtgactcattagagatgttgatgatggtggcttaggcttcatggaaggagagaagcaagtggattctagaaatatgttggtgctggtcaagttgacgtaacttattgttaggttctggatgtggcatcagttacttctmtagggaagatagggaatgaaggaagtgggacagatttattggaagtgtctgatgtgctagatgcccaaataagcaaagtcatgttctgatatgtcttctctgttcaccttgctttctgactttaatattgaagaaatatttgctctgctgtgaagaaaaatggtagctgacctgcattaatatctgctattatagtgcattcactccacaaaaattaatatagcccctgctaagtactgggaactgtgctaggcactgaagatacaatgattcctacttacctggagcctccagtatagtgaggaaaacatttagcaatgagtccacactgctctgtgttccgtgctaatccaggatttctcagtcttggcactactgacattttgtacccgaagattcagagtttggggagtgagagtatgcatagtgagatgttttgtagcattcaggcttctacccactagatgccagaaacacctcccacccagttgtgacaaccaaaaatgtctccagacattgtcaaatgtcccctgtgggacaaaattgtcaccagttgagaacccctgccctaattccagcccctgatgtctgatgacagtgtagccaagttctgaagtctgttctcatcacctgccaggtttgaaagtgtttcctttcctgttagtggtagagccaaactttcaatatgtgaaagcagctggtagcacttgggatgaaaccaaggtttccttttgatgctttattcactttggttagaagtaggattgcatgttattagcagtctgggaagtttggagaagtccaagtgattgttttaagtcaagaatgtaccaaattgatcactttgcaatgccctgaaaatatgaatcattgaaagactttttgatctttcacggtccaaacatactrcagaaccaccatcgcaacacatcacatcttggtggtagagtctatccagttcactgattcaatcatataaagaactgtgtagatttgacttgtcccactccaccactgcttgtaagttttacacttgagttgaggagcagattctgaaacacagatagcctgatgggcaaaagacaagccacaactctactctgcaatgccaattagcaacaayggcaattagtcctcctggttatgatgctaatgtttatgaagtgtaaattatgtgctagacattgtgaaagttgccttaatttatttaatgttcataataacctcataaggttatgttgttatgctggtaaggaatagggccaggattcaaacatccatatgtatttagaatctatgatcattttgtttgtttgttttttgagaaagggtctcactttgttgcccaggctggagtacagtggtatgatcatggctcactgcagccttgacgttactgggctgaggtgatcctcttaccacagcctcccaaataattaggactacaggcgtgcaccaccacaccaggctattttttgtagaggcagggtttcgccatgttgcccaggctggtctaaagtgatctgcctgccttggccgcccaaagtgctggtattttacaggcatgagccactgctccctgctggaatccatgttcttaatctctatgccaaactgctaatttcccatgctgctgttttccactgagtttaaatatggcctcggactcctcaacaagagctactgctagttgatcagagaggcatttgagatgaaaactctttgcccatcaatacctaatgtttcttcctagtcaagtattaggcactgaattcctctgaggcggatcatggggctgctgtggacgcataggagttaatatcacgtaaatctgaaagcaagggggaaaatggttgaactatatctcataagtaacttttcaggctcccctgaactttaatcagtggaaatggtattgtccagctgctttgttttattttcctttttccttttacaaaggcagttagaacacacttcctacaaaaatgctgttcagcgmacttataatgttgccatattgctggtcccagactttcacccttggggacattctcctatttctccattaatgggagatgcttttgaggatcagttctagggatcttttttccatattagagcatataaatccagtttagtttactgcaccaatcagttcatgttatattcttttcttcttgtttggaaagagccatgtacagtagtctaaaacctgaaagctgaagggagatgcatttccctcttattcctgccatcttgctccttattgaactactggtagatggggcctgggatgcaacaccagttgacaccttgaagctgggattggttctctgtgctactaatgaataggctacagaaacaatttgctatgtttccctttggatgtcctataagcatcaaataaaacaagtggaccaatgccaaactttagtcaggtgaaatgttcggtccaaatgttgcagcataaagataataatattgttcactgaccaacacaactgactacatatttatgagttttttagatatagttttaaaatatagtgtgttaactttgactgtgtctatgagtaattcagctttttaaatatggcacttaaaattctaatttaaagtaagtttaaatatttcctatcttttttgtataaagtatgaaaacgcttttcaaggatcagtgttttcaggctgcccaaatatgaccaaagagcatgttctttgatttgctgttgggcaatatttttataattgatgggtgggtggttcattttgaaccaagtcttcactttgctctgggtttcgtctttagcaatttcccatccccatctaaattatatttttatgacatacaacattaattaagattgtttttcctttaagaggtgattaaacatatcccccaccattggtaatagcctgattccatatagcttcacagcactcactgaggaatactactttgtaatcttgtttctcgtgttctggcttaattttccagctcttaactctggctaaatagattctaccccctaacctctataacactaagcctcaggaaagtgatcactttaaatttacagttgttaaatagattgttaatgaccaaaataatttatcaatcttggctggcaggcattatatttaaaaaagcagacgactaatcaccaaatgctttgttgatggttattttcatcacactgactgccctccttggcatggaaagccattaggcaggagagataggagacaagccattgtggcaaagtggtgctgatgctgggaactggactcctgagsgcaatttgtcagtttgcttaggaggttcaaagctcgctttgttgtgctcaaactttactgcctgtttgaccagctatgtccctcccgatgatgtaaaaatctgctagtttctccttttgttgttgttcaacttgtatgatatagggtcactatttagacagagcctttaggtaagtcaaggatctcagaaggtatggacttggctaaattgagttatagatggactattattttacatcaaatcattgtcgaatggcatctgtagcttttaagtttactttcatctttttgtttttagtttggagacaacgcagtttcatcatgtctgctttctaacgtctctttaaattcagaagtcccctaagaggcagctcttcaggaaaaatctaaacagaaatctcagagtgcatgtggattccttgttccccagagtcttccctgcaaggatcctttaaatggatcactcctcatggtcatgtaaaatgattttacttacaagacatccaggaatatccaatttttaagaacccatatgttttataaagcaagggcacacctagccctatgtgaatgcccatcgaagagatgactcctatgtatgcctgctgctgggagacacaaaggcccactccagacctaccgtcagcaaggttcagaatataggcacagtggcttcctggtgtgaagaaattggctaaggtttgcctcctctatcatggaactcttaaatttttgtcctgttggttcatctgtgatgtcggggggatgactggcttagaacggccatgccctgcacatttgcagcctcagtccttctcaggttgcttacccatctgtcctcttctacccagcaatgggaattcttctcactggagccccgcttagcagcctgtgtctttaccaatcttccttttcccttcatgcagaataaaccactcccttttccatatcatgcttttcctggtttgtggttagttgtccatggtagcctccttgagggaagaggccacgccttcctcatattttgtgtccttggttcctgatattttgcccgccagagttggcaactgaccccagctggacaactggaaggattgatcaactatttttaaaccatagcttttcaggtcttaggaaagtgtgtaagtccttggaggggctggaacatatcccaccaatttgggaacctacccttgaggagtacataacccttattctgaccttacgttgcataaatgctgagtgcatgcttgtgtaattaaatcaaaattgatagcagccacctaatgcagtgtgctgattaacttagggccatctcttctcaaagtgtgtgctctttgttcttcagaatgataacagattatgagagccagtgttgggggggagaaatgaaggaaattctatggcaagtaacattgaaaaatgctcagctaagcaaaattaaatactgttctttattgaagaacttctttgaccttagcattgtacgtgaaactaacggaagagagataataagcagcatttccaaagtactttgaactatgatatttttattataatttctctctctcttttgarcagctttttggtaatagtgtttcaaagatcatacttgggaaacgctgatttaagactgctaagatgcataagctggtttggctgatttcagagtaataaaaggcaatagttaagcgggttcccattttgcatatgaattaacataagcattgggaatgtaacagatgaacttcagaacttccccaacaggaaatgaaccgaggcagcacagagtgttcaggaaccctaaacccagcctttccttgaagccctcagtaaggcaggaaccagaagtttcacgrgcagcccttttcttttccagtgtttggccctctaggcaatctgaaaaagagtcccagattgatgctcagtccgtatttatggccattctaacatgaggaatgtagaaaatggagaaccagctatggacaccaccaagaackcagatctaattcccaccatggagtccccacagggcaataatctgcttagatcaaaagaggcctccagagccctgcaggctttatcctctcaaagaagttaatttcgtacttggaaataatgaaattactgatagatcaggctggaatctctgatagttaatatcatcccatctctatatcctatgacagtgctgttaacttgttgtaatgtgatattttgagcactgcttagatattattttttaatgacgtcttcattgaaggcctaaagctttgcctaagattctaaggaaagttttcacatgaaagagagagataatattaaacagacactaataagtcctctgaagaaaattcattacaatatcattcgcaaaagaaaagaaggaagaaaagaacaatacccttttccagccaatgtatgttctctcattaggattttacatttattactgtactgttgctgcagatttttcttatgtgtgtgcttatgaacccatgaagaattagtgtcttcttaatgagcaccaaagactgtatttattaaaaattctttgaccttacgtaaaaaagaaaccatttattagcaattatgtcttaggattagaaagtattatcttttgaagcattccaaccacgttgtagtgtcttctcctacttgagctttcaggatctctttgagggatcctcctctctgttataaggagggtaagtttttctcaagaatgcaaatcacttggccatggttgcctagtgagtcagagaccatgctaagggtctcaccttcrtgatgtaatttgagggtatggggaggcttcatttatctgaggatagttttcctaatggcctgtggtacgtgtgctagaattatgattagagattcatgacttgtccttttaggaatccagttaagaaggcaaatttgggagaggtggcccctattatcaccagaacctttgaaacaattgggactggatggatgtcagacagtatgaattagaaaggctggactgcctcttgatgcctggtgtctagtcccatttttattggycagtgcccaagcattgttgaatatctttgaatatcatcccaggttagtagggaaaaattaagacaaagggtattactgagaataggatggtgctctggtttgaatgtgtttccaaagtttatgtgttagaaacrtaatccccagaacaacagtattgacagatgggaacttgaagaggtgattaggttatgagggccctgctgtcatgaatgaattgatgytgttatcatgggagtaggtttcttgtaaacactagctcagcccttctcaccctctcttctggctatgtgatgcctttcaccatgttatgacatrgcaagaaggccctcactggatgcagcttgccccttgatctgggacttcccagcctccagaaccatgagccaaataaatttctgtttattataaatcttccagtctcaggtattctgttaaagcagcaaaagcagactaagacagatgagaaacacaaagccaaactctgagtctttctaaaggtcatgttggacaagccatatcactggtggtatggagactaggacccagtcatagccctgtgatatttacctagatccctcaaagaaaatcaataaatatagaccatttcctttctgatatagagctaatgtttaaaagagaagggtcttgattttttcccatatatttcactgtacagtgaagagaatatataccagtgaataatatatggtccttattataatgttggaaataaaatgaatacaattgtgcttattgtatagttcacttgcatcattgctttgccttcaatttgggccttttagctgttgtcagataaaaggctacaaggaatttgtctagtttcagtatcacatgcaatgtagatacacttttctccttattagaacaaaatttagagtattttttaaaagatggttctctatataagctatgcatgactacttttaaaattatagatcacagttaacatagaatacagagccacttggccaagctaggtgagtacagtgaatgtccaagcctgaattattgggtatgaatttgttaagagacaacttgttaaagaaagcatactccttcctttcttctttcagagtgccccgatggcaacagaatccttgaaatcctcagggaacaaattggggataaaagttagaaagtacacccgtcttattttccaagctctgagcagacccaagaaaaaagactgaatttaatcaaaaaagattttattgatgaaggtatctctccttcaggctaaactttggcccctgcatgctaataaaaccctctcatttctcagaagtagctttctgcataaaatccagggagagaccatggacaggaatacatcttggagaaagggaattgaagacgatcaatcagaagttggcaaggtctcccgctgtcccttgctgagttaggaggcacttgcctctctctgggctggctgatttttaattcttgggcagtcacctgaatgcctttggattcttgagaaagtgtaggatgtgctgctggatgcaactgcttctctcagctgatgctggctgagctctgggcaattgcaccctggtattttacttctatgttatctgcacacgtggtacttttactgcccagatatgaagatgagcaatctggagcttcaagtttttatgactgctaattagtaccctgtttgtgcccttttaatctgttattataataggatggcatgacatgcagttttttcttggctctctgactgctgcagccagagggggctgtatttgcactttctcattacctgtgcgcttaaagaatattaataaagatgagtttaaaagggcaatgttctgaaactttctagtcctcaccacaaatgtggaatttagatcctgttcttccccaggcttttggcccaaagatggtgctcagactccagcgaacagagatgggccatgggaaagattccactgctactgttcttgctctggttcgtttttaatatgagataggaagagatgggggatctgcgaggctatgtcacttgataaagtcaaaagtgaattagrctgaagttcaaattctgggtctttggcttattatctaggaatccctgcacaattgcttttctttccatgttgttactttcccccttccaagcctccctgctccatacacacttagccaaccagccagccaaagttatttactgactgcttaggtactcacttctytgagtgccacaggaatgcaaattccatgaggtcaggggccacatttgtctggttctctggtagccctgcagcaccatttctgacaaatagttggttctcaataaatgaatgtctaatagacaaaaaagacttaatttcttgtcctgtaaacaagtatcagaaaactgtctcactggactgcggaaataattgactagtaattgctgtggtttggatgtttgtgccctcctaacctcatgttgaaatttcatccccaatattggaagtggggcctcatgggaagtgtttgggtgatgagggtagatccatcatgaatagattaatgacctctctgttggtgagttactccctactctgttagttcccatgaaagctggttgttaaaaagagtgtrgtgcctcttcccttctctcttgcttcctcgctccccatgtgatctctgcacacacagccccccttcacccttgccatgagtggaagcagccagaggccctcaccagaagccaaggccaataccaggcttctcgtacagcctgcagaactataagccagataaaccttcttctcttcttgaattacccagcctcaggtatttctttatggtgacaactaaacagactgagacagtaacataatacctgcacagtgtctrgtaaatagttggtcctaattcagtgggagtgaagtttgttctttcctctgactgtaggagctgggatgctcaggtgaaatgtggcctcaggctcacctgggaatgagcgagtgaagttaggagaggtaagaatgaacactgcctttttccagactgtcacatatgataggaatgtggaggtccttgcttctgtcattctcttcatttggtagaaattgttctgtaaccacagagccacaggaagccactgcgatgctatgatattcagaggtccagaaagctgccttagattctgcatatcagagcttgcccaatggaatggtgttccccaaatgtgtcttttgccttgatcccataaccctcctatccttgcaagggattgcctggcattagcttctcttagggccagagttctgaacatttcaagaaaaactagcaaatgtgctcttggttgaggcctgcctgcctgctagttttactcaccctgagtatgtgcgagttcatataagtcactatgggaaacctggcacgtgcttgcaattcccagtataaagctgatttcttttggaaaatgaaagcagcgctcatgtcctttatacatgccttgaggcttacatggaaagaagtcagaggaaaaaacccacctgttggtgacaccccaggcacatgtatttcagggactgaaaaaaagcagcattcaaagtagcagagctttgcaaggatgatgcagttaggatgtgaagctggctcttgaaaagtggatgatcaaacagagcactgtactctactaaaccgaaatccaataggctgcagttgctgatgttctcattccatcatgaattctcagaatagcttggaccaaatcaaatcagagacatcaatcgttaaaaaaaaaaaaaaaaagcatcaggtagcatgtactttctagaagccctttagggctgtttctgagggcatttttgttcctgcggtcactgtatccttcagactatcttcagtggagaggacacatggcagccccycgtgctcaatgctgcttcctgtttcttcagcaataytttcagtgtctgaagatgaggttgaaccatgatgaagctgtgatctccagtggctgagcccaatgctcatcctgtttcctcttctgaacatatatagaaaatggactttgtgtgctaccaaatgatcctaatagcaaactgatgagctttcttttgcgccataagggtgataataaaaggaaggatttgaaaatatctttatttgaacacatttttaaaaattagcaaatctgttttggcactccatttttgttttgctttattttgttttggtgaatttttcttactgctctctgaaatgtaaaaccacaggaatagttgacttaagttcatttttgtccttgaaattaaatgttacagttataaactatttggatacaatcaaatattgtacagaatcttttaacattattgagacatacagagtgcatattgtcccaaggatctcacattaatgacctttcagtttaatactatcctgctatataccctgtaactacttctcakcagctcattggcaactgacaaggtgttgacttctcccattctatcctgcctgctaaaagtggattttcctactgtcccatagcgtgactcccctacctaccctcaaaatatgagaaagagctttcaaatctgtcaccatctggtagccttgcttttggggaagtagctggtgtagcttggcattatagccaaataaataactttagagataggaaatggttttacggaacttcaacaatgacacaataaatgtcttagcctctagtttccaaccataataaagttgtccctagaaaagttgagtggtcagtttttgctgagatacacaataaagtatatctttattgtgttgatatccagtggtgtgctggtaaatattaacaactggtttttgtgtatgcatgtgtgtgtatgtatgtgtgtatatataaaaacatatatccacataccctcatacatctgactgcttattataaattttactgatataaaatgtgcaccacacaatttgtgagtaatcataaaatatacaccaatctttatcatagattctatatagccaatttgattctcacagaatgcttttgttaatgtttgttgaattcctgtaatcacagtcaacttatgattgtgattcagccatgatttgaaaattcagataaggaataaatgcttggttactacccaattaagcaaagttgctcatgtcactgacaaaacaggtgtgcttcagacatgaatattggttgacatttttgtttacataaacaagacaaaagtgaagcctaagaatatatgtcaaaactttactcatttgtcaatcatatgagtgacatttttgccaaatcagataatagatatagaacactaaagggtattttcttaattttttgtactattcaccatgtaacagctattgacacaatatgcttttaagctttgtctccataatcattattttcccccatcactttcttaaatctagatagccaagaaaacagttaatctgtagtgtttccagtttccagttcatatggctgaattgaagctacaaacctgatgtcactgcacagacttggaaagagacgtgcggtagcacactactgagagtatttccaccacaagatacaatagaygttgatatggtttggctgtgtccccacccaaatctcatgttgaatagtagctcccatgattctcatgtgttgtgagacggaccctgtaagagataattgaatcatgggggcagtttcccccataccattctcgtcgtagtgaataagtctcctgaaatctgatggttttataaggggaaaacccttgcacttcgttctcattctctcttgcctgccaccacataaaacatgcctttcaccttctaccatgattgtgaggcctccacagccacatggaactgtaagtccattaaatctctttttctttttaaagtacccagtctcaggtgtgtctttatcagcagcatgaaaacagactaatayagatgtatataacctaagagcatagacaatagtaaaatgtagtgacattatgaggaattacagagtttttaatattttcttccctttgtttttaatatttattactttcaaattacacaatttaatttttaatggctttttaagctaccagcttacaaaatttctgaaaattatacaaacagctcttgtgatctggtacaaaccagctctcacacatcactgcttatatcctccttatatgggtcctgaaataagcaggagacccggaaaatttggaaagaatggaggtttgctgacctagtaaggacactgccaagaaaataatttccactgaacattctcattttcctcctccgaacagcatagtcatggccaaagtcattttagctttgccttttatcagcttaagaaactgtagatcagctttaggcttatgtgttcaacactaaggaacatgccatgtttcttcagtgacaaaggcaaaaccaaggctgatataggaaagcaggaccaatggaccaaggtgttaggtgtcatatgtttttgggagcagcaccatttgccagggcatctgtcttcttcctcacagtgtacttcagttttctacatgttcctcctaccaatatgaagttatttgaaactcttaacccctctgtacctccacctactttccttgccagacttctccttaaaacatttgctttgtagggatgtgaaagttatctctttgattgagataatgtaattaaagggaaacttgatttccttgccaagtctggatttctctaccgagtaccacctcagggatttctaaaactcaattacagtctgctctgcttgttagtgaaaacaaggtgctataacgatctctcttcctgataatctgttttctgcatttaaatattgttaatattttttttccttaatccagctaattgaagatgtgagggtgtttcaatagtatgattcctgaaatttgtttcataaacgatattaactttatacttccaaacatgttaaagtgtgaatatgttttaaatgttttgtyttccatatctaaatgtattttaagacttttacattttgcatttcctaccagcagtgtgttttatactgaatgcaggcatttcaaaagactcctattttgagcatgtctgtgcctgaaagtatgcaatgctaatttgaacagtaagcaatgtaaacacctcatatttaaaaattggttgaaaatgagaaaaagtactattttagtgaaaaagaaagtaagaaataaaaagttcttcatgtgaataattccaaagcacctcatggtaaatttttttctcctgtcccatattgctattatttagtaacagaaagcttgcctcatctaatttattggagagaaaactggcacattattgtctaccagaaatgatatggggacaggtttatcttatttcaatttgcatttaattaatgagttacaccatatattaatcaaagcaaatatctttagaccataaccaggcaaagatctttaaactctaatattctatcctaatgtttttagcctcttcttgtattaaacttaattgtattttttatttgtctgaagaaaaaaatggttatatgcaaaggaagtgagggtgatttgaagtcttcatakagccagttttttacactggagtttgtggttgatagatwtgttttgttttgggaggtccttcaacctgtagaaattatatgtgaacatttatgtgtatgtgcattttcctcagggttctattakaatctaacagggggcttgtgatgctctgaagtttgaaaatgactgccttataggaatagtgaagcccactttccacactaaaatgatttttagtaatgagctattgcccrtacccccttcctttgtgtctcttaaaagacatttttattcacaaattctaatcaaagggtaaataatcaaatatgtttaaaaaagatccaaatacttggccagtgtagcaaaaatcatacatatggttatcagcttgtaatgggttggaacctggcctctctagaagcaggtatctatagccaggtggtcttactatcattttgtccctactgtgtggcctactggaagcattcagttgcatgattaggggatagatgaaaagagaattgttgagacgtggcaccaaaggtacagcgtcattgcccataacatatgtttatacatcaaacatgtttgttgctttagggaatacatccattaatctatttttttytctttcactttcaagtgctgttgagatgtcaaaggaacaatagcactgctattccaagtgccctcaaattggaagtgactgtatttattggcattgctcaaagaggcttaaagaccaatacccattcattccatgtagtctgagaatatggaattagaaggagcacaatactgttttggctaatggtaaaataaaaacctggaatgatgaaggtgactcattgatctaacgtctataatcatgaattaattcactttatgtctgaattacctctgttcttgctcttataaaaacagcagctgattgatggattcctgtatgcctgatactatctcaggctctttacattgataaagtgatttagtcttcaaaacgctgtcatttataggcattgctattctctctgttttacaaatgagggacctgaggcacatagaaattgagtgcttgcacagtgggacacaggtacttagttgtggcactagattcaaggctagtcagtcctgtatcccagagcccaggattgggactgtgcttaatccctactagagaagagaaagtgctagaagcctggaaattacagtggtccagacagacatggttctttctgctatcgatgaagctgatagagaccaaaggggtggtagtagaggctactttgaaaccgaagggcaaggcaggttccttggggaagatttaagctggatgaagggaaggagccagggaggagagagatccctgagagagagagaagagcaggcacaaggtcttggggagggaaggcgcttggagtattctacaaacagcagaagcaggaatggccaaagacaaacgagcagaggggacaggcaggagaccaactgtggctatgtgagacttcttaaccttaaaacctaaagggatgtcgttatgaggcagcttcttggcagtttgatgccatgcttctttgtccctgtgatctgaagccatgatcttcttgcagaagttttctatcttgtgttctgtctttgattacctcctatttccatatggacttctccttctcttctctcttggttcctttggatgtggcacttggccacgttgctaaggggcgggggrgggggggtgggggaaatgattggttaaaccattgaattaaaggctcagaaataatgtggcccaaagagtcttaaagaacataaaagtattggaggagagttcattaaaccaataactgagccagagycttcattcatgttatatgaggaaccctccactatttagctgtttgtggacccagcaattgctgtgattatcccatcattgccagtgtccaatataatgtttgtatccagactgtgttattaactttatttttcatttattygaccctacgtaatgttaggtcatttgtgttttgtttggggctgtgtgggttttttttggagcagtccggttttgtcataacatgcatcacatagttaagatttcatatctttgcttcatctaccccattatggaaaatggcagttgattagggttttctttagatcattatcaattgttttctatcttgcagatagtgctgttrggacacatctatcataccccagagatcctatatagctcgttatttctgagtgatttattaccttactgtggaaatgtagttagtgaacgttggggaagcaggggctgtattgagaaatatcaatgtatcctcatgttctggcttgcagtgacagtcagagatccatctcactgacagttaccttgttaacattttgatcagatggcaaatttgtcatttttcatgataacaagtataagtttgcacaagaaccacagagagatgagaaagataaaacagccctcatttagtttttctgtgtgatgtaatcagtaatctctgggagaagtgaaataattactgtgtgagaagctcatccactggaaaatgtgtttgttgtagaaagctcagatttttcttcatttggatagaatgtgccctttcttcttcttcttttttttttcctttgctgacagtttgattaacacaccaagcctatgcgaaatagacagaaaaaaagggtttacagtcagaatgcttgggtttaatcacagtataagatatgaacaaggggagtaaaaaaaatagcatgcagaattgttgggaacagtgaattagctgccatggggatggggtttgggtgtttcctccttctacattttaaacttgctctcaaaccctttctcgttagcgtcaatatcgagtaatgaatgttcttctctaaacgctcgtcaataactatgaggtggcccatctggaggcctcactcttgtgtgatcacacagttaataatgtctttatattgtttttcttgcactttctcttcggctgtgttcctcatgctgtgaaatgtttaaactcagagcacttttgaaagctcctggctctacctggtgcttacagggtgagtgtatttgagaaagaatcccactttggggtcagcatttctttacaatgcgtgagagtcagaaatgggcttctgacctgcctctgaaaataatagttctcagtgcagtggacagctgttagttagagcccataacaacctgtgacaaacccatattattgaaactcaggtaagactggagtaagtacatccacacagacacttgaggcgggaagatggagctctggatgtcaaatatgaatttctcttctgaactgtcttatgactcacacacacacgtgcctggaagtccaaagtgtagttggtttttaawtgcttctgtcaggtaaccatggccttgggaaaaattatattatgttttcataaytgcagtgaaatgcaaccacagagaggggaaatatgccaagtacaatcagtcattccttttattatactagtttttaaaggrgaggaagtgctcatggctgcatttatatgaggcagattttttctaataatggtacaactattaacctaaaatataactacttattccttattaatttggcctatatgcatttattccaatgaagagttgaaagtaagcagttaaggtgaaaactatgtttttgaccatcctactaaatcttttaacattttgtccaggtctgagtgagagctgttgcattttctttctcatctgactcaccattcatggttatccaactcatttgagggatagggaaatactttctttctatttgtctgaatataccaatttgaatttgtcattttgatggctagtattcttataggaaacatatggagagatataagaaatcayataggaatctcattttcttggcaggagatcctgtgatattccttatagccagtattatctgaatccctctaaaatcttcatctttttactttttcttttggtatctgatgatcatagcccaagcctctactctgcatgtctgaacatggtcaatgtcttaaatgacctcctctccactcgtatttctgaagaaccatagggcttgtttacatgtcccacaagcctgtccctcctgtcacttgtcactttatgctatggatcactgctctgggccttcctgcttgttatctcttgctgcttgcagccatatcttcatgtcgcagaggttgttccatgaccactttatccctgtatggtcatcagcacccactcagttttccaaaggccctgtcaactctacacagtcatttatgacaaaccatttttcaatggctttaggaaaaacctgaaagaattacaattctgaaccagttaagtagaatgattttggcagcacattatagaaatcatgattcaaaaagttccaayagtaaggagtttaagggtaggatagttccacctttgagataatgaatggttacatcagttgcataaatgtcatactcaagaatataacatcttcccttctttctactcttcaatttccctgcattggcttctggctcaaggttagcacacttcatggtcacacaataactacagtagtatagccatcctatctagacccattaacagttggaaaagaatgattctcatttcttcttatgtgtctcttttgatggacaaggaactgtttcacagatgtctcctcagctagctgagcatgtgaatgaccggaattgtatcatcttcctattcctatcagtggcttaggccagttgggtcaagggtaagattagcttcccaagaagaagttgaacaaatgaaaaagggtagcttcctctcaaaattggagttacgttagtgaggtaagaagggggaacagaaagtaggtagacaaccagcagtgtctgatactaacacaggaaagtaaagcttaaagctggattttacatgttactactcttaccccttagtggcaggaggtgttctctactagtcattttgaccttcacctgtgttaccctgtagcaggggcttatctcccaccaaaggtatgagtcccctccacctcttctctcttgaagactgttttgtgccctaagttgactgacaatggaacattggtctcctttgagggaagtgccatccccatcccaactcccacagcagcaggggctggggaggggtgctgctcccacactccctccctgcccctgycccagtggccccagaagccaaatacttctctataattccagattattctagtttaaataatgtagcttatcaaacaccaaaaatccatactagaagattttaagccacatgaaattcacattgccatttaggaaaaaataatcttttttaagatcatagctccctattcagatacctaattaatgaatatatatttatatatgttttttctgcatatatacatatatatatttgtggtaagatacacataacataaaatttactattttaaccattttcargagtacagttcagtggcattaaatacaggcatatgaaactataattacatctaccaggtgtccccacctaatagacctatgtatatttgagtgatgattctttttgatttctgtgtctctatactggaataaagaatctctgaaatttgtaatctataaaattcttgaactaaaatctttttttttyyttttttttttctttttttatcaaacagaygagttgtttctcatcctgagggcatatgtgcttgggaaaaactctgacatcttaagaaatgatgttactcatggctgacgcatggctggcatatgaatccatatgaatatgatatatgaatccatgtcacaggccctccctctttccataatagaacacttccaaaatggcttcccatctcttgttaagccatcgttagctccctgataatattaacccatgaataatggcctctagaatacattttttattatgatgaaaggtaaaatttcctttgctaaaaactataaaattttcctttgctaaaattataaaaaaaaacttgtaagcaaagatatctagatgctcctgatatcacaaaaatataaatagttactctaaaacttccccctcactgcacaggagggattaacaaatcacaggacattttccctattccctgaacaaagattatagacccagagagagccctggtatcagacaagagtcttgaggacgccaggcaggatggcttcgcccacacttctctggccttcccaaatgatgatgaagaggtaagctggggcaatgtcttccctgggagatggaaacctagacattcaacagtgagtagtagtttaggggaaacagctggcacctctggcagtcgcctcagaggtcaaccagcgtgtagattgctttccctcaggctttggtgacagtgacaaaagaagcattcaaaatcataggctgagtgattgttccctggaagcaagtctgaggcccctgcagacgtggttgtcagtgttggatcaaagcactcttctcctctggacaggaaacaaagcagaaagaataaactggatgcacctcctatctccagaggtaactaaaaagatrcacctgggaaggaccactctaataagggtttttgatgaaatggatcagagtcaaaaagggaagcacttgccgaaataggagatgcttctaaaaactcttgattttccctttggctttgcttttgaaaaatggaagctgtcttgtggggatttggagagtgattgaaggtgctgattagcagctgatgaactgaaagggagtgctagaaggaatggaattggagcccatagaagagcttgtggctctaaaggggaaaacagcaggaggcaaggtctgtctggttcttgctgcatccctagtgcctagcatggtgcccagcacaggccagggtaaaatcgttttcttctgactaactggcaaaaaaaaaaaaatgaaaaacacaaaacctaagcaagcagccggatgaagtctcctgacctccctcccttctttcccaagcccackgtcctaaccccrtaatatcgtacgtttcagtctgtgagggaataagcagggagcagcgggcatcttctagatccctggaccagcagcatcagcatcacctgggaacttggaaatgcaaattattgtgcctcaccctagacctactaaatctgcaactctgctgactggggctcagtaacctccaattcagcaagcactccagggaattctgaaacagtaaagcttgagaactaccatgctagtcgaaattatggatcaatttttaacttttttgaactttttaaccaggtgtcttggcatttcgtgaatacagcatgagccctttgcattaacacatggcacgaaattgttttttggccagagaagaagttggatcgayggacttgagagctttgaacttctttttgaggcatttggggttagaatgacgtagaaggggatctttggaacatgaaactttttgagaaaagctgtaaatatttttgtgattcttttttgagaggcgaggatagcttatgatcctcacatttccctgcagagcatttgggccagttttacttcccagtactgcatgtgctgaaagaagaagagagaagttgaatctttaaagaggagaccggttcaccagaaaaaaaaaagtgttgcttggaagctgaaggcttcatactaatttgttgctttcctcttcaatctgcatgagaacagagcaaggttgctgtctcsggagatttaagcagggaaccaatctagtttgtcttctaaactggaacacatgtgaaagtgaaaggggagtactattaataatttccctaggacagtgggtgtaaattgggcgccaccctagaccagtggttctcagttgggttcttttygactcttctcccccggggcacatttggcattgtctggaggcatgtgtgcttgtcccarcttgagtggggctgtgtgccactagcatcaagtaggtagaggccagggatgctgctcaacatgctgtaatacagaagacagcagctgcaataaagaattgtctggctcaaaatgtcaatagtgmtaaggtcagaaacccttggctagaggacagatgggagagtaggtgaccagtgaaacaattagaatgggkctgtgctgcagaagggcttgaatgctggaatgaaccatttatgttaattggccattcaaggctcatgagcagggaagtgttttgttagaagttggtttgtttcctgctgtctttaatacccagcacaatgtcaggcatatagtaaatgatsagtaaatacattgtccatctacccatccatccatccagaaaatattacctgaatagccaccatgtgcctggtagagtactgagatttgaatgtggaggtaagctttatgaaagtgattttggcatgggtttaaaggatgggttggaatggataattactggagatgaggaaacaagtgaggggcactgtaacyatccagaggtaaaacagggagtgtttaagcaagtgccaactcaaagtgggtggaaaggaaggaaggaattgtgtcaaaaatatctctaacccagctatgtgatttgacccttgactcagttcaggctgtgaaggagatgaaggtgagcagggctgcttctakattttgagtctaggtaactgaaagactagtgttgtcaaaacaagatctctttncatgggaaaattgatatgtcaactttgtacctwctgagcctgatgtgctggctgtacaagttggagcccccaacaaggagmtaggkatgtgggtctggagcccagggaagacaggttagtgggacccttgcccagaattcacttctgcatctaagctcaggctacacagcttatcatgtcatcatcactacagctataggataaagggttatctgctgagtccaaaatctgttgccttcttgagaaagatattgagaaacatccataactcttcagagttctttttttwaaaaactatatatccattcaaaatatgactctcactatgcaacctggtggaaaactctgcatttggcctygaaattcttctgttaataacagacattgttctcagaaaaggccattccctctggaatttcaaagattcaattatgcagtgaattttctcctttaccaaagccgttgtcttctactcctcacataaacatgagcacgtggcatgttttaaataagtactgctggctttgtctttgagtcaccaagaagaaaagccagtccccacatcagcctcatcgccctcctcatgaactcagtatgttgtgaattctgctttagggttgtttcttcctgtaattgcctgagcccagggcagcaccttttatctgctaatcatgaggtgatgttttagtactgtgactcccaaaatgaagcccaagakcctaacctccttctctattgctgttttcctttcccctgctgaggactccagtgacktgaggagacccccatgaaggaatgcctgcataaaatggttagggaaagtacatcaacggtggcttcagtgactactcccactcagccccatttctgtaattgattagtataatctggagagtttaatctgagatacatctaatctttggaaactttgtatcaccttggttttgcctgtaattcccatgcatttatcaccgctgtttagatgtgtattatctctgtaacacrtatcacaaattgactcttcttgtcttcagtgcrcaagagaaacagactttgcctccaaaatgtcagctagtttctgttctgggaggttacctcttttaaatgtggatacttgtgagaaacaactctatgtggagtgctaaaggatgtggaaaaggaaattaggctacctggattggaatctatccaagggtatccagtgtatctggtcttacccggcagacattgctaatctctcaaagactctttacccactgaacccagacacagcctccaagtagcttcctggctggctgtcattatcagttctttggagtgggcaaataaartgaaactttggtgttattcctgctagcctgtaaaacttattatgtgagcttagccttgtcacccaaatactctaagccccattatcctcatctgaaaaatggggtggaggtggtggtctttgtatgtgtgcgtgtgtgggggggtgggtaaggatactatgttacaggattgtagtagggctacatttgttaacatataagagagcattttgaaaattgttgagattcttacaaatattagttattaatagygcacacagcaaaattcaggttatctataagatcaaaacgtatttacaatattsatgctctctgatattgctctcactggcttcasaaatgtcattctggtggctgcagaggtgacttcctcagcagagtacacacttccttgccactataggcatagtatttgctaccctgtatcaaaaaattatggagtaggccattcaaaatgtcgctggaggatcagtgccagtcctgaagaaatgcaagttgtcagtcttggataagaaactttatagcaatttgaagtcaccatgacatccaagtatataattggtggccttatcctattgaacaaggagaagaccagttccaatgtgatcagacttgtgtggcaagtcacatgtggtatgaactatgtagtagtcatttacagtagggtcatgaatcagactgccgtaaatagaggttaaatacacacacacacacacacacacgcacacacacacacacacgccctttactatggatgatttgagaagtatcaatatagaggatgcaaatgtgcctatgtgtgtctgcttctagcaataacagggaaaatgtttggtttatcaaatagtacctagtgcttttgaaatctggaatcttctcatattagaggctgggctccctggttttgatttttgacacatgcatggtaccttaacaggaaagcaacaagagattagttatttgcaccttgcaggttcttccttccttattaatggggctctctgctttcacaaattctctcttctattaagacatctgagaaagcaatcaccactgccaaaaggagccagcccagtaggagtgggatggattagttcttgtccttatgagatacctttgttgttttctttactatgattttattttcttgactattaagactcgttaagactgaactgagtgaaacaaaacaaaaggaggctaaaaagagattaaaatatgagactacctgagcttttctatatacagggcaaactaggtctgttgatgaatttctttaagcttcagtttcctcacctgtgacatgggaatgggaatccttatattccragtgaaaagtgagggtgacatgaggtcacacaagagtagtatttatcacagagccttggagagactcggtgcctgatgctcgcgatgcaggggtagagtatatagttaggagaaggcatttggtagtgaaatagaggtgggtttgattccaagatgtgtcacttctcagctgtatgaccttgagtaaattctttgaactctatctcagtttccccagctatacaatggagatgataataattgctggtatgaggattaatgataatatagctgatgccaagaatagtcagcactcaataagtagcagctaaaaattggaagctatgattataattaattttactgcagaagaagaattcaaatmatctagatttgggtgaccataaagaagaaaactaagagtaaaatttccctggaattacagtgggcagctttcatctggtaactttaaattaaatggtattttaaaaatgggtatccttcgccggttgtggtggctcacacctgtaatcccagcactttgggaggccgaggtgggcagatcatgaggtcaggaggagcccatcctggctaacatgatgaaaccctgtctctactaaaaatacaaaaaaaaaaaaaattagctgggcgtggtggcgggcacctgtagtcccagctactagggaggctgaggcaggagaatggcgtgaacccgggaggcagagcttacagtatgccgagatcgctccactgcactccagcctgggcgacagagcgagactcygtctaaaaaaaaaaaaaaaaggatgttctttaaggaaagatggaataatgactagtacatgaaaatgcaggcattcggtatcaaatacaactcagtgaaggatggtttttttctataatgtgaagtctaaattgggaaatgtatcacctactgaaaaggtaatggttacagaatttgggcaggatagaaagcataatctttgagacccttatgtgtcctttattcttggctcatctggtagaaagagctaaactagttgagcttgttggttgmgaaaaacctattacttctaatcacaaaatcggtctgttagaaaagaggagccgtagtttcatttcataataaacttatttgaaaggcagtggagtgttgttgtttctgtctgctagtataacttccaactctttctgataatagtgcttcattttcactaaataaccgttctcctacatttcatatgatttggggtggtttactggtcatagtatccccctttccaagccaacaggatgggaatgtaaccaggcttgcctaattaagctacactgtcccttggccacagcgattggcccaaggagtaagcatgtgatccaaacagagttgattagaatctttccctgggattttatatatgaacaataggaaagagaatttttcttcttctccttctccttcttcaatgtgggctcactgagcttgagtaattagacctacaaatggttaaaaccatctacttcctcctccagccaccaccaccaccccctgatgaacaggaagtcagcccaatacccagagaagcaaatcgatggagagggcatctaagcattttgaatttctgaatgccactgagttcaggaatagaacttgtatttaatgttggttggtattggaggcaagggtaatatttgtttgaggttctgtattgctgtcagagaaatgcactgtaaaccacgtggtactcaaggaacataaactgacttgtaacaaaacatgttgatagcaggatggtgtgattcaagacctcatatttgctttttatatcaagggatgcttgagctaattttcttttcasagtccattgataagtagcaatatcttgtattacacattccccattatcattttgacatacactgacagtcacatggagaaaacaattttttttttccgcgtggaaatggcacaatactaatcttattcctttgtcctgattatactgtgaacaggaaatggaacaacgtcaatctctctgctttgggatccataaaatgtgtttgtagagaggactggcattttggtgtactgcaatgcagagaaagaaggtacacttggtgactgcatttatgatttgagaaaatttcattttttaaagataatgaatttagctcttccrctagggccatgttcagtctttattctggcaaaacacaatgaaaggtttttttttttttttttttaaaaaaaaaaaaacatttccacagcagtagttcattcattaagcccaaaagaacattagctaagagtaaaacgttgggttttagcctcaagactgtcaccagctctgtgtataaccttggtccgtaactttttcatggactcagtctcttcaactataacaaggttattagagtactctgccttctgaccacartaggtttatcttatgacttgagatggggagtacataccctaaggtggaggtggggagatgattttgtcctctataatctagagtgaaactctcaaaagtctagggagtacataatatgtgatatttggtcctgaattttagagcagttttgaatcacaaaatagttttctgtggctaaggcataccaaaaagctgaagctaatggaactcccsctggttctagataaaaggattaaggcaatcacacaagcagaaaaaggggaggatagtgagataaagtaatcacaaaataaagcaaaatgcataaatgcaagtgaagtcatcatttcagtgatagatttaggatcagaatgagaaaatccctcttctcatttctgagtgtatggacaatgagaaatcttaaaaggggagcaatttctgtcttgagatttcatttatgacttaattatgtgttctktggtaaattactttcactgtaatgctgattaagaatgaatgtggttattatgttttgatcttgcattgcttcagtaacttcttagaaatcatcctttttagattcaagtagaaagtgtgtccaaattttaacacaggaaggacaaactccataacaaagagaatgtcggtgatcttcataaactaccactaatgactcattctcttattaggttgagagtggttctgctgattattaagataattagagccatcagattttgccatacctcacgttgatggtataatttgtagtcttttaactaattagaggctacttttatggtgtggttgtaaaagagggtggagggtgatgcaatccctgttaatgaacttcacgaaccccttatttatcatagaaagcaaaacattagagattattctgtgaccacctttaagtgttgtatgagaataggtaatyaaagcacaaaaagaagccgagcagcggtgacataaaaccttcctaaattatcagccggatttggaagcaagaatgcgattgccggtgagagacagtggcaaacccgctrgtctcagcccaaggatattgtgctgctctttgctaagtcagttggccagaagctatctacagaagtggcaattattctattctttctaagcactatctcctccctccccacataccacgtgttccaccctccccttctcaaattctggttagtgatttcaagtaatcctttagtcccatcagatttacttttagacatatcccagatccagataatttgcaccatcttcactgcaactctcttccaggtcctggaaggtaacagtcttcttgttgatcctccagcctatgttcttgtgcctggaatctactctctgtgtggaagaactccgcaaaacagattttgtcatgcccccgttgtcaaccttccattggcttccaaccactrcacaatgacacccaaactccttgtttgagtctggaatgccccgaatgatctgccttcctcatcttttccatgcctctctttattcacccaatagcagttacattgccctttttctattcttggacaygttragcttgtttctgccttaggctgtctgtactggccacttcctctgcgtggaatggttcttcctggatctcacatggcttgctgtttctgcttattcatgactcagctcagattccccmcyaaaccccagccaggctttccctgtcctctctgcaagtggcccttactccaggtactctctatctcatcatcatgcttgctggtctctgtatcgtctatcactctctgaaatgtgctcatttattcaggggtttattgtctgtggctggtaaatatttgttgaattaatgagttactttaacaggagaaccatatttcatgtgccrtctttcataaaactgtggtatataaaacagatgtagagggaactgctctggatgcastgaggatggagaaggcactggatccactttgatgctctctctccccgttcctgcctctgccgaacctcaggctctcactccccactctgaatttgatgaatgcaatttgaacaccgtagccctagactgttggttgtggaggtgaaggagtggctgggtacatttccaccatcgcctgcctgaatccaaagcttggctggtaagccccactgtgaatcaagactttctctcttggttactctyctttgcagaggagccataaagtagattgcaaagggtaaaagcattctgttagtgagtgaatgggtcttaacaaaagatctgttcccttttatgtcctgcagaggctctgacctagaatcccatttggcacctcgttatatcccaggccctggctccaaggggaggtcgttatttcagcctgtaatctgacatraaggcttcccatttttcagctacataaagtaatataacacacatctcagcatcagacattaggattaacactgacaaggcttacgttaaaatgctytgctaggcagcatctctaaagtgaatagaatagctaacgtgcttgcacgatgaatgattcttcatggggagaaggatttatgtttaaatactattaacattttcactgtgacagccawggtttaaaagactggtatttaaatataagatttaatgtatttctataatawtgctaatcccacagtattaattttttrtgcttttaagtttgataacccaactcaccagtttagaaaatgtcatttcttccttggtttaatttttttctttttttaaatgaaattgaaattatacaattaagatgaagtacataatttgaaaataaggaaccrtctatttgacmtagagtggaggagtcagaaatgggcagtttcaatttaggctgaatgtggatcattaattagcagtgacagtagtagtaatacaactaattatgagcctgaagctctggccccctcaggagaggcagccttgatggtataggaactgctctggagattataggaaggtgaaagaattaggcctcccttctaaatgaacagcatgcaaaatgtttttttttttttctctctctctttcatataatttcagaagggccttttaggcagaaagggttaagtctgaatgccccctcttccttcttccacagaaaagcattgcttcttagaggcccacgttgtgtgcagagagagggtaatgcatgcatgagggtatgacatgaacaccagttcatgagaacaaagaaactgcaagtcgtgttaacctgcccagggccacaggatataggrctgcgggttgtatactagatcagccagagtgggctagatatgctgcaggaatgaagagcgccaatatttaaacaatacaagtatatttctaacatgctatattaatctgttttcatgctgctgataaaaacatacccaagactgggaagaaaaagaggtttaattggacttacagttccacatggctggggagtcctcagaatcatggtggaaggcaaaaggcacttcttacatggtggcagcaagagaaaatcaggaagaaccaaaagcagaagcccctgataaacccatgagattttgtgagacttcttcactatcgaaagaatagcgtgggccagaccagcccccatgattcaattacctcccactgggtctctcccacagcatgtgggaattctggtagatacaattcaagttgagatttgggtggggacacagccaaaacatatcatatgccttttgtgggttagctaggtactgtgtatatgtctcttccttttaagaatataggccgatcactgtctgccatctgcratcttgctggttgtcatggcagaaagaaacaaatatggtaaattgtgcacgaactcataaaggcttccacctagaatgggatcatwtctgttttccttcattggccatggcaagccacatggccacatctaatttcaagggagcagggaagggcaaacttttcattcagcaggaagaagacaagctagaaatatttgttgatggctcttaaaactaccgcaggcaccttgccaatgggtgagcaggagctgaattygagctgcaatgctttggttaagcaatgagctctggctcagagcttcatctgcctggaagaaggagcacctttttttatcctttataagaaggtacttcagaagaacagacccttagctatgtaatccattttgcctgctggatgacggtaataatcttaattcattcacttgttttcatattcagaagtattgagtgactccctactatgagctagacacagggagtagagctgtgaatgaataatcatgcatggtctctggcttcattgggtttatggtcactcagggaagacagataatgaaaaggaaataattacagatgtgatggatgctaatggaaggagatctgtaggatgctataggatcatatgacagcaaataagttatccgttgcaggcgttgtttcttcttatgcagcattgtgactttctccttcagggatacccaatggttttgartgctttcagcagataattagaccaaaccaccaataatttagaggacttgttatttgggacatcagtgagcactggagtagtctaaggggtgatgtgcgtcacaaagcaggccctgaaacgtccctctgatgttcattaagactttatcgtagagtggctggggctgagagggagtgggtaactgcattggcatggagacaagcattgacccaggtttctaaatatctcaccttaaaagggccctgttgcagtgtactgcccgtattccttggataggactattcctcggataggactattcctctacacattgtcccctggcttccatctttaaatactattacattctggctgttgtctttttctagtcactggtgtctacttcgtgtttgtgcagtgcaaactagcctgaaagtgctaggaatttaatctcccagcccacatcctaccccgtcaccccttggtagcagttatcagaatgactcatggaagttggtgagtaagtacccaggctcctttgctcttgtggaggaataactgggaaacgtatctatagtgtttcccagtgaaacggagtccctcttgcccacagcaatcacatgtttaataacacacattttcttccctcccgatcttacttcctcactccactagtggtgatttctgcaattaccttctaaatcaactacttgccttcaaagtcttgtcttcagggtttgctttagaggaacccagcctaagaaaagtatatttaaatacccagccaataatccccagaatggggacctgtgaaacattctctgtgtctgctcttctacaaacgggatgctaagaaaaaaggtgccatttgacatagataacacagagaaatagcaagtgagtcttgctggatggtcattggtcttagctggctgattgctgttatgattgttgatatggtttggctgtgttcccacccaaatctcatctcaaattgtagctcccataatccccatgtgtcgtgggagggacctggtgggaatcatgggagcgggtttttcccgtgctgttcttgtgatagtgagtaagtctcacaagatctgatggttttataaagggcagctcccctgygcatggcctcttgcctgccaccatgtaagatgtgcctttgcttctcctttgcctttcaccatgattgtgaggtctcccccaccatgtggggctgtgagtccattaaacctctttttctttataaattacccagctatgggtatttcttcatagcagtgtaaaaatgaactagtacagttttgctttcaaaaatactggcagggtacactgtagcatcagttacaggttttttttttycccaaaggcatcttgtgataatttggcattttttgtttatattcatcatccaactagtaccaattacatcacataatcctttggggaaaaaacacacactttaacacaaagcaaaggccatagaaaatatatttgactatttttttttccttctgaataccatgtttcatgttcttctagttcataatttcttcctcagctgtwttgtttactatttaactttttggcataaaaatatattgatgagagaaagaaattaaggtctaatttatgaaaatagacttcttgtacttcaggaaattcatgtggcgctatttggaaaaggtgatgaatgtgattttcagtagagtatctgcataaattatgattgatttgcaattcatcaccttcctttattgttcctcctcagtgcagagaccttatctgtgcattatcaaggagggaatatttttagttagtgattatttggcagaagtgctaataatgatggggaaatttttaagaaaatatttccaaactgggagtttctgcattttcaaaaatagcaccctggaagtttgcactgagcccttccatctttcaggtgttgccttccttaaatgatgtctgaaaataaatgtttctgtgtgagtttggccccartgggtttggccttgagcttcagagaatgacattagggcacagaagtattgccagtgctgcctattccacagcctcccaatcagtataactgacgtctcaatcttcctcaccctcatcatctttgtacatggtgttggtgtccatgtttgccatggaatgggtcatcttgtgttttagctgtctttgaaatagattgcacttaccctatataccaccacccatgcttcctcatctctatgtgcttgtgcttgcttccccttcagccaagagtccattcttctcatcctgccagccagtcaagctctgtttcaagtttctgctcagtgccacgtcctccacagagcttygtccatcagactcccctctttcttcctcttctcttcagacccaggcacaaggcagcccactatagtaggaaaaaaagagatctttcgggttctatggacctgggctctgccatttactagctgggggatcatggatcrttactggattttcataccgtgctatttcaatgtataattcccaccttctggttcagagaaggagcttggggaatgtaaatattctttttccttcwattttctgaagtttcctcacaccttatctgacactctctggtggctcctttttattctgttctaccctgtattagaactatttatgtagatgttttatctcacttttcataataaacacaaacatactgatacacactgactgccctgtgctcaccaagcacctgttctccagtcagtctcatacttttcattaaatcaaacaaacaaggtaaacaaataaatacctgtgtcttaagggtgttgatgaagggtgtggatgttatgggtggtgatttggaataacaraagaattatattacacctaacacttcaaaatttattcaacttttctycaacatccttcttttccctacaagttccattccctatggcaactgtttgcttgtttgcaagtactctctctcaatatctagcaatcagtttttctccttgcatacctggtcacccttctctccttctttataccgaatcttctttttctttttgtaagtcagctagctgtcctttggccattctcatttgcattcctgatcatcaattcttcccaacaaagggtcttctcagaaaacaaagaaggattctaatcatgtataacataattttcccattaaacttatgctattttcttcttctcagagctcagcacttttagtattttttttaattctgaagctgtttcaaaccgacagaagggtagcaagaactgcggtatcctttcaccctgattatccaccttgcaacattttaattctctttcattcagagagatcaatatatagatattccctttcagatatgatgctccatcactcttcaggtgtttgattaccttcccaaaacaagagcactcttctcattactattataaaaacacttccaatcaggaatcaacactgatacagcactaccattcagtccacaggccccattcacattttgccaactgtctcagtgatgacattttcttttttggtccaggatgctatacagaaacatacactgcatttaattattatttttcatcagtttcctccaatctggaatggttttgtttgtttgtttgtttgttgagagtcagagtctccctctgtcgcccaggctggagtgcagtgacgcgatcttcagctcactgcaacctccgcctcccagcttctaagcaattctcctgcctcagcctctggagtagctgggattacaggcacacacctccatgcctggctaattttttgtatttttagtagagacggagtttcaccatgttggccaggctgggcttgaactcctaacctcaggtgatccacccgcctcagcctcccaaagtgctgggattacaggcgtgagccacagcacccagcctggaatggwtttttattctttccctgtctcgtgttttcctgccttaaagagtataggtctttttttcctgtaggatgactctttctctggagcttccactgtttcttcattattagactcaagtcatgtattcttccatgccatcttggcaggaattccacaaaaacgctgctgagctcttctcagcatatcacatcagaaggcaaccacactgaccrtatccccacttgatcacctggtccagttggtacttgccagatctccccatcattctttgagcatttctttatattstggtacaaaaaagatgctccaggatcatcttatactgtccstgtccagccttggaatcagccacttctccaagcagctctggttcctgtccrtgtagaatgattttagaaatcaagatstgggtgcttagcatgcttattgttcctgtgatgtcaatgctttgagacccagtcaacacagagmtaggaaatatgtacatataagtccacacaaacacacacttattattatttccatatctgggtatgtgtatatgtttacacataagccacatgaattcatatcagtatcttcaattcaaatmtaagtcttttcccccttccacatttataaataccttctstgacagaaacttggttcccattatccttaatatatatactcatttgttcaatattagccttcactgcccaccacstgcgtacatctcatcctctgctctgcttcctcacacactagaaacaccactgcccccatccatgcagcacccctctccccacgttgccctgcatgttcagttacagagcaggcygccatcactacccacctccacaagacacccctcgctcctgcctcctcagatgctatcatttctctccaagawagaaagggaaaaggctgggcacgatggctcacacctgtaatcccagcactttgggaggccgaggcaggtgaatcacaaggtcaggagtttgagaccatcgtggccaacatggtgaaaccccgtctatactaaaaatacaaaaaattagccaggcgtagtggcgggcgcctgtaatcccagctacttgggaggctgaggcaagagaatcactggaacccaggaggtggaggttgsagtgagccgagatcgctccactgcactccagcactccatctcaaaaaaaaaaaaaaaaaaaaaaaaagaaggtgggaaaaggaaggaagatcaccatttatgtctttttgctgatagatgatgtgggaaactcccatacacctttcacarcagtcacacatatgttgaatgggcaaaccattctttgacatctactcactcccttttactctctctgcattacttacttgtctccaaggctgtgtctaagcatagttgaagacagaaatcatttaataatattcagctgagccaactggccataaagctgagactccaattaggggaactggaagctctgggcagtggtgtcaggggaccagcaggtggcgcccgtaagttctactctaaacctttctgtatccaggcttgttcactaccttctttcaccacctggtttctctctatcagagctctttaaaaatatgttagcattcacagttcccagtatcgctgcagacataaatgttgagaaatgcattcttgttttccttcccaaggcaccaatagtacaaagacaagcataaagccccttaggatacaaaaaaaaaaaaaaaaacccagcactttgcacagcatagtcataagtgacgtcactctgtaatctttaacaggagtggtgttttccacgctcataggacaaactgactcttgaatctttgttaggcctccctgtctaatcgatatgtaagtttctctagggaaagaatagggtggaatattatttgtataatcttgtcctatgaaaatatgaaagagattattggcaacatttttgataacctggtggaataaaactccaagccctgcctaaggtaaattatcataaatcttmtatgtcaggaacgtggtagagagttgcaggtaggcagtgaagtggccagaatgtttaaaaaaaaaaatattctgacctgkaatctgtggcasagtggagagagttgcggtgacatatctgatctcattagtgcttaaggttcctcacgcagagatggagaaatgacagtgtatcgctcattcctgccctctgaagcctttccattagaaatgctgcaatttaatctcacatgtcacaaatcaaaccccaacttgaaaactgcttcccctgaaaaggtgaacacattccatgccttgtggaaggaactccagtgcccctcagaggaagtgctgtgtccccgatagcagctggtaatatcagctccacatttgaaaggaccccaggcatcagtattcagagactgcgattgttacattagcgtgactttttgcaacttatgtgactttgggtgagttgttgaaattccacttgactcagtttctttattcactaattgagcataatctccaccrttcagggtggttgtggggattaaaggagagttaaaaaaaaaaaaaatactcagccggggagctaagtacttgataaatagaagctgtaacttattattgcttactgttacttccagactctgagctaagggctttatattgtttacttccttaattcccacagaattagatagatattataaaaagccattttgcaaagaaggaaactgagtcttagagaaattagataacattgctacattatacagctagaaaaatggtacattccaaagctaatgaaatctttctgtaatgttacactgctacttgtatattggaaataaaatttgttatgccttacaattgagtatactactaagaagaatggtctgcatctatattcctttgtgagagaaggctgtaattttcctcccttgtgatttttatgcctggtcctagtaacagggttatactgatttacagaatctatggggaataatctctttttttctatcatatggaagagtttgcataaaattggaatgatgtcttccttgaacattgggaaaaatttgcgtgtaaaatcacctggtgtgatgttttctttgcaaaaaaaattttaacaattaccttaatttatttaatagccatagggctatataaactttttgttatttcttgggtccattatggttagttataaatttttaggcatttatacatttcatctaaatttttaaaaattttgacagatagttgttgacaatagccatttattattttagttgtaataaatattcactttttcattcaaaacatcttcctcttttaatcgatattgtcaaaggtttatctattggctgggcgtggtggctcacacctgtaatcccagcactttgggaggccgaggcgggtggatcacgaagtcaggagatcaagaccatcttggctaacacagtgaaaccacgtctctactaaaaatacaaaaaaattagccgggcgtggtggcgggcgcctgtagtcccagctacttgggaggctgaggcaggaaaatggcatgaacccgggaggcagagcttgcagtgagccaagttagtgccactgcactccagactgagcgacagggcaagactccrtctcaaaaaaaaaaaacaaaaaaaggtttatctattaattattttatcaaagaatctacttttgacttttttgatcttttctagaaaatatttttctatttcatcaatttgtgctcatatttattgtggtttttcttttgctaaatatgaacttattttgttcagtttttgtatacttaagattgacaccttattaacattgaggctatcttctattataagtacagattttaatatgtagcatttcattattattcagttgtaggtaacttttaatttcttcatagtaaaatatcaagtgggggaaaataagtttgtgaggatagcataagattaaataaggatggaatcctttttataaaatttaaaacagcttagattataaagcatgttaggaccaattatacatgcaataaaaccctgtaagaagaaagatgaacctggcactcaggaacataatgaccttggagacaagaagataaatgggggaggacaacatggatagatgggggtcattatgagggtcaaagctgttggtttatatgtggcattcatgggtgtttattccatttaacagaataacttaccaagtaatatcaggaaaatttttataattaacattgggcaaattcttactatgtaccagcccattttaatactcactgtatcctcaaaagaaccctgcgaggggaaaacattgtttaatgttacagttatgatagatccaagtactgagtgcaattagtattgaatcaaactgcttcagaggccacaattgtgatcactggatatgagttttggaaaggcaaaccaaagtctttttagtaatcaggtctgtagttatgtgaggtagagagcttcctgtcagtggaaggattccaacagagcccattttctccttccagggatgtgccgttggataaagagacttagctgcatgagcttcttagcctcctattaataccaaaggcctcagggcagtctggctcctctctctctgctcacttaatgagaaagttatttagagagggagcctagtatggcaataatatgggctctagagtttcctggacctcggttcaaatcccagatctaccaattaccagctttgtgcctgtgaaaaacaattctattccccagacctcagttttttcatctgtaaaaatcacaaaattgtgaggattaaataaaataagctctggattctgccctgcactgtgcttggactagagagtgctctgcggtgtgagagagagggaaatgagatttgctaaatatgtgatgccagcacctggattccctaagacaatgagttctgacacttcacgaggtagaataatgacctaagtgatgattgggatgctcattggaaagtcagatgggaaacttgacctctttgccttcctgtccctgtttttttgcacatgcgacgtaagcacaataccgagcttcaattatttatcagacgtatttgtgttcagtgacacgtgtggcagatataaatctgtgggttcttccccctggaatgcttccgggcgagttatacagcagggaccctttaaagcatcagcgttgaagagcagagattgatttccttcccagcctttttctttcatgcaccttargcttctggggatttccttgcagtgcagggctaacgacttttgataccaatcaatgcaaagctaattaatttacttcacaattttcatgtactcgaagtacccaatggttcaaatgatttgttgttgttttttgtttgtttttgttttttttagaagtctgttctttgtcttatttttattttttacacgtggactaattagctcctgatgactttatctattggtgggattctaattgtagcaggagtgtggattgcaacgaaggagcactgagattccatgacttccatgctttttaactgctaagtcttcatgacaggaactctagactctcaataagtataattttattttgatagtttatggaaattagctagctaattttaactgtctctgggaagttccaacatggcatgagatggaaagtgtctatgtgtgtgtccccatatctctgtgtctgcatatgtgtctgtcacacacacacatgcacacccacaatagaatatgatgaaaataaaaatttgyggaaattattctcaatctggaaactataaattcttcacttcttaatttaaaacatcatcctttcatggtgatattaaagaattagttcatttagataagcttccagtttcatattttgaagtatttagtggatattttattgastgaagattacacttagttttcatgttggtataatttaaatatattattcataggacttgcaaatcacataatacaactgagaaaacaagatgtacctcaatgatagaaagtataggctatgaaattcaccaaacttgagtttgaatcttggctctagcttayaatggccagtttgaaatatctacattctttgagtttcagcttcttgaactgtaaaatgaagatcataatagcctatgtggatatttcaaaaatgagtgttcaaacagtgagataccaccacacacttattagaagagcccaaatcagaacactgacaatgccaaatgctagagaggatgtgaagcaacaggaactctcattcatttctgttgggaatgcaacatattacagcctctttggaatacagtttggcgatttcttacaaaactacatgctcttacaacatgatccagcagttgtattccttgatatttactcaaaggagttgaaaacatagccacacaaaaatctacacatgaatgttcatagcagtcttatccttaattgccaaaacatggaagccaccaagaaattcttcagtgggtgaatggataaatacactgtggtacatcccaacaagggtttctgattcagtgccaaaaacaaattagctatcaatccatgaagagacatggcggaaacttaaatgtatattactaagtgaaagaagcctacctaaagaggctgcatgctccatgattctgactatatggaattctggaaaaggcaaaattatggagataataaaaagatcagtggttgccaaggattaggagggagggagggatgaataggcggatcacagaggatcttttaggacaatgaaactactctatatgatactgtaatggtggatacatgccattatacatttacccaaacccatagaatgtacaacaccaagactgaatcctcttgtaaactatggactttgggtgatatgtccttgtaggttcacaaattgtaacaaatgtaccagtctggtggggggaagttaatatgggaggcaacatatgtggggcaggggatatgtgggctatctccgtaccttactatcagttttgctgtaaacctaaaacttctctaaatataaagtctttactgttttaaaatgagtattcatgtaaaaggtgtggcgcatttcttggtatatagtatgtgtgatataaacaccacccgcttgtcgatgggggtaatattactgtttggtaattcgttctcttgctctactctctacccgaagaacaaagcaccacccaagagtttaaaaattaaagagcttacactgaaggcctccagctagtttacctaaggagatggaatgtggctgggtggagagccatatgctggagaacagaactccaccataccttgaatgattatatgtgattttcagaactactcaatgtaacagtttaattaaaatatccaggaagaactaatatcccccgactgggtgaatcttatctctactaaactgagactcaaggaatgtgttttagagcaagatgaaagkgtaaattasaatcagttctacaggtatgtgtgactactctttttctcttaattgggaccttcttactagtttgttttaaaaagactgcaaagtcgtgtctgattttcatgttgtcagaagcttgtaggagctttaatcttgcagtttaaaaataacacctccaagaagaaactaacataataatgcatgtagcatcactggggatcaaggtaaattctagtgggaatggcaacttgtgatagtgatattctgtagttttgggcaagaccctcttgtctcttgagaacacgaatgaatgtaataagcctgactgaggggtgaaatgagctttgcaacaatgactaagaacaaagctaagtattacataggttgggtgtgtatcaagtgataattgaatgggcttggagttggctaaacctgggtttgaagctcaagtctaccactccattagctgtttaacttaagacaagttacttagtttttcacactttgccttcttctctgttaaattgagataaacataggtcccttgcatgggagttgtaaggatcaagtacaataatggatatgaaatacttagcataggtctggcacataagaaatgctctgcatatttctaatcttaacattttctattaaatattacattttacctgacatttaaccagtagctaatgagccataaaagttctagttagttaataattaatgagctctgatcgtttttgagctatgaggattaccaccactctactaccaccatcttcatcaactttagattcctcatatgagaccatcagctgactgtstggaactcagccagattgaccttgttagaagatccaggaggagccattgagtcctggatcagaatatcacagcttcatcatcagtgtccaaatccaaaatagagaagaccctgctcttttcattgatttttgtttaccaaccccttgtgaacaatgaaactggaagactattagaagtagaaagtattggccataatccaggttattccctcgaaggggagctttggtgacatcagaatggattagaacatacaatcaggcttttaggwtgccaggatcaccacctctacctccccttgcacagtagtattctttttgttgccttaccaacacatttacaaatgcagaaagactcttgcttttgtggcaagtcacacccacaaggtgccttttctcagacatgtgtgagtccttcagtcattgttcccagtgtcagtgttgagtgcaggagctgagaagagaggtgactcatttttaattgatatcttaaataaagttccttggggtggccatgtattctgtccctaacctctctggttagagagcctgagcttgtatcggctcattaactctaatagcttgacctttagcttctcttctgtgtgtgatgtaccagccttcacttctcctgcgtaatttaagtgcagggatataycacattttttattggagggcttaggtttttcagggttaccctgagtctgagtttcattttaatgaggcagtgccagaaaacaacaaggattccattacctctaagagatatacccaaagctttgggcccaacatagtacttatgcagctgcaaattaggaattaaagtagatgttggtaaagaggtaaagttgtctgttcaaaaagttgctagggaatattgcaaattaaaacatttgtccactgataatgaaagttgacagtttcttcctgcttagattttaaatccagcatctttactttttgcaatttatgtggaaataatgaatgttttgtgttaagaccttctccctctagggaacagggcttcacctttctaatttttattaaattaactaccagcatgcagggaatttcatgttagcatttggtcctagcagatcatttcaaaacacattggaaaaaatatacctaattaaaattgtatggaaaaaaacccagcatgacttacttttaggctgttagtgcatatagttgtgtatctataatttattttaaagaactaaagtcaaaggtattatagcttctgcagctgaacatataccttataatatttctgattttgtcaaaaattaaattatgctttttccttcactgcagaaacaatgcatatctccttctataagctactcttataatatacctgattaagaataacccatatttatttctgaaaacattacaagtcttacttttagagagcaaagaagttttagatagttcgtcattaattggtaaacaactagctccttcctcctaaacatgtctcttgtttcatctcttccatacagtccctcaggtacgtgctgttggaaagtttaggaaacgaattcctakcatccasatwtcatctgtgtctgtttatatwtgtgggttggaggctgtatatatttgtgggttggaggcctagggtagtttgcaagccaccaatcggattgaagtcttgataattttgcctccatgagattgtggtttggacacaactcatatcgcatgcattatttgatctttttcatatgcatttaataatgggagaatctcatcttttttttttctgtgacagagtctcattctgtcacccaggctggagcgcagtagcatgatctcagctcactgcaacctccacctgccaggctcaagtgattctcatgcctcagcctcctgagtagctgggattacagacgtgcaccacaayacctgtctaatttttgtatttttaatggagccatgggstttcaccatgttggccaggctggtctcaaactcctggcctcaagtgatctgcctgccttggcctcccaaagtgctgagattacaggcatgagccactgagcctggccgagaatcttatttcttaacaaacaactatatacattagcttgattgcctataaagggatatgaacctgacctcatatatgagagtactgtcctaaatggaatttgcatgatgacaggatttattctgttttaggatcatgtgatatttgaataaacagaaatataaaaacaaagaatgacagatgcagctgaatactcaagagtgaaggatgagagacagggactctgaaatgagatctttttccccaagtgttttattgttactgggcattgaaggaagaatctgataatgctattctggtagagctttacaatggcatttatatgacaccatatttggaaaggttcctcagacaatctaagtgccagcaagttgaatggcattattactggataataacaaggctggaaaacttagaatagcttaccttcccattgcgttacctaatttatctaatatatcctaaatgtaagtactttgggaatttcagaagaaaaagtattgaatgtcaacacaaataatcttttttgtctttataatttctaagatctctattattttagaagatattctaaatattattttagaagattactgaaattgctcaaaaatccccaaagagctattaaaggtctgtgatttttttaaatctttttggcattctttccctataaanataggtatattaaaatataattgatgggaagattatagagtatgaagcttgagaaatctgtatttccacatagataacaattgcattggcagaatctgtctgttgtagctattttggaactctggagtccactgaaggcctgaatattccagggaaaggggcacaaattgtgattaatttcaatcaatttcagttcttagcacagtaataactacccattccccatctttcagccccatggcaggcagctgtgcatgtactcctggtttgcacatggcttgtgggagccacggtgggcaaaaaggactctatcctgcaaatattgggatctgtattctgattactgattgccgttttcaatcacagaggtacaaaaaagaggtggtagccattattgttgtaccttcctctctagctgaagtgactcctagggaatttaaagggctgatgccttttttcgcttcccttaatttttcttctttccctttttgggacccagatattgaaaactaggacattcaaaagcaactacatatgtgggagactttagatagctactgtgcatgttccaggcaaggcactggctcagaaaagactttaagtttatacctcagagtgatccttgctatagagttggcctacaacaatcaaaaacatgaaaacaaawaccagcaaccctagcaaagggggagaatctgatttcaagaattatcatattattcgattcatatgtccagttttcaacaaaaataaaattacaaggcatatagagcaacaggaacgtattaagcattaaagggaaaataaataaataaaccaatggacactgagctgaaaagacctaatgatggatccattagccagatacttaaactacctatcatagagatgatcaaaaaaactaaaggaataattggggaaagtcaagaaaataatgtctgatcaaaagggcaacatcaataaagagagagtgatgcaaagaaaccaaaaataaattgtaaagctgaaaaatataatgactgacatgagaaattcactagaactcaaaggcagattttgacaggcagaagaaagaattaatgaatttaaagataggtcaatgaaaattaagtctgaggaacagagagaaaaaaaaagttgaagaaagatgaacagagcctaagggacctgtggtacaccatcaagtgaaccaacgtatgcattgtgagagccccagaaggaaaagagggagacagaaaggggcagagagattatttgaagaaataatgaataaaaacttcccaaatttgttgaatgacatgaatatgaacatcaaaaagctcaccaaaatacaaatagggtgagcctgaaagactcacaccaaaacacattataaatactactaytgaaagtcagagacaaagagagaattttgaaagcagcagaagagaagagatttgtcatgcactagggatcctcactaagattatcagcagattttttcattagaagctttacaggccagaaggctcagatattcaaagtggtaaaagaaaaaaaactstcagccaataatcacgtatccaacaaaactgtactgcaaaagaagtaaaggagtgaagragaaattaagrcattcccagataaaacctgagaaaatttattagaactagatctgcccttcaagaaatgctaaagggagtccagaaggttaaaatgaggtgatgctagacagtaacttgaagctatataaagaaataaaggtctttgtattggtaaatatatttgtaagtagaaaagctagtgttattttaacatggtatgtaattccactttttgtttctatatgaattaagagaataacggatttttaaaatatattggtctaaaaatcaatattattataactttggtttataactccatgttttgttttctatataatttaagagactaatggataaaaattattagttgatgttttgaggaagtcaagatatatagatgtaattttatgacatcaacaacagaaaggggagggtataatgttgttaaagtagcacagtttttatatgttatagaagttaagctggcataaattcaaattacagtgtaataacttcaggatgttaaatataatttccatggtaaccacaaagacaacagctaaagaatatacagaaaaaatcgaaaaggaatttaatcatttcattatcaaaacaagaaatcaaccaaacacaaaagaagacaggaatacaggaaatgagggacaaaataaacctataaggcatatagaaaacaagtcacaaaatgacagaatcaaacctctccttaacagtaattactttaaatgtaaatggattaaacagcctagtcaatagacagaggttgacaaaatggttttaaaaaatcataatccaactatatactgtcttcacagacttactttagaaccagtgatgcaaataggttaaaagtaaaaggacagaaaaggatattccatgtaaatagtaaaccaaaacagagcagagttggctatactaatatcagaaaaaatagactttaaataaaaaatgctagcaaagagacaaaagacagaagttaagtaagaaaacagaggacttgaacaaaacagtaaaccagctggatctaacagatacatgccaaacactctacctaacaacagcatacacattcttctcaagtacacgtgagacattttccaggatagaccatatgcaaggccacaaatgaagtctcagtaaattttaaaagacagacattgtacagagtgtcttctctgatcacaataggatggcattagaaatcagtaacagaaggaaaactgaaaaattcaaaaatttgtgaaaattgaataacacaatcttaagcaacaactggattaaataagaaaacacaaggggaattagataatacttaaaagacaaatgaaaacaaaaacacaacatatccaaacatatggaagtaatgaaaacagtactaaggggaaattttatagctacaaatacttatatttaaaaataagacaaatgtctaagcttacaacttagaaactagaaaaataacgcactaaccccaaagctaacagaaggaaagaataaagattagagcaaagataaatgagatggagaacagaaaaataatagaaatcaaggaaaaactagaaaatcaggggaaaaagtgatttttgaaattatcaacaaaattgacaaaattttagctagactaagaaaaaaaaccagaagtctaaaattaataaaatcagaaatgaaagtgaggacattgctatcaagtctacagaaataaaatggattataagcaagtaatataaacaattgcatgccagcacattggatagttcaggtgaaatggacaaattcctagaaacacaaaacctatgagactaagtcatgaacactgaatagacctaaaactagtaaggagattaaatcagtgatcagtaatctcctagcaaagggaagccccagaccttatgactttgctggtgaatagtaccaaawatttaaacaactaaaccgatctttttcaaacttttcaaaaaaattaaataaaagggaacacttcctcattctatgaagccagcattaccttgatacaaagacattgcaaaaaaactacagaccaatatcccttataaacattgctacaaaaatcttcaacgaaatactagcaaaccaaactcaccggtatattaaaagaattatacatcatgaccaagcgagatttattcttggagtgtatggatggttctatacacaaaaatcaaccaatacaatacatcacagcagagcaagaagaggaagaaacacattatcatctcagttgatgcagaaagagcatctgccacatttcaagccctttgtggtttaaacacacacacacagacacacacagacacacacactcaacaaactaggaaaagtaagaaactaccccaacatgataagagccacatataaaaaacccacattgaacatcatgttcagtgacgaaagactgaaagatttgcctctatgatcaagaacaaggaaagtatgcccattttcaccacttgtattcaacatagtacttaaagtcctagccagaaaaattcaaccagaaaaataaaggcatccaaattgaaaatgaagaaattaaattatatctgtttgcagattgtattaggctattcttccattgctataaaagaatacctgagacagagtaatttataaagaaatgaggtttaattggttcacagttctgaaagtcacacaagcatggtgccaatatctgtttggcttctggggaggtgtcagagagcttttactcatggcagacagtgaagcatgagcaggcatgtcacatggccagagcggaagcaaaagagaaggagggtgtgggaggttccacacacttttaaacaaacagatctcatgagaacacactcattatcatgaggacagcaccaagccattagagttctgcttccatgacccagtcayctcccactaggactcatctccaacaytggggattgcatttcaacatcagatttgaaggggacaacatacaaactgtattacagatgatatgaacttacatgtagaaaaccctaaagattccaccaaaaaaaaaaatctgtaaggagtaataaatgaattcaacaaagcaataagacacaaagtcaacaaacaaaaatacattgcatttttatccactaacaacaatctgaaaagaaaattgagaattamaaagaataaaatacttaggaattagcttaaccaaagaagtgaaaaacttgtacagtgaaaactgtaaaacatttctgaaagaaggtatcaatcaatgaaaacacatcttatgtttatggattagaagatttaatattgttttcaatactatacaaagcgatctatagacttaacacaatccctgtgacaattccaacgatgctttttttgctgacatacaaaaagccatcctgaaattcatatgtaattgaaaggaccctagatggccaaagaaatcctggaaaagaacaaacctggaggactcatactttatgattacaaaacttactgtaaactgtaggagtcaaagcaatgtggtattggcataaagatagatttatacatcaatggaatagaatagaggatagaggagtccaaaagtaaaccttcacatatgtggtcaaatgatttttgacaagagtgccaagatgattaaatggaggaaaagacagtctttccaataaatgccgctaggaaaactctgtatccaagtgcaaaagaatacaattaatgttaggtacattccttaccttacaccatataaaaatttaaaatgagtctccgacctaactttaagaactaaaactataaaactcttagaataaaatttagagcaaaagcctcatgatattttatttggcaattatttatcggatatgacaccagagacacgggcatcaaaaggaaaaatagatgaattggacttaaatgaaaaacatttttgtacatcaaaagacaccatcagtatagtaaaaaggcaacccacagagtgagaaaaaatatttgcaaatcatatatctgataatagattaatattcataatatatagataattcctaaaactcagcaacaacaacaaaaatcactrattcaaaaatgcgcaaaggactagaatagacacttctccagagaagatgtacaagtgtccaataaacagttgaaaagatgctcagcatcactaatcactagagaaatgcaaatgaaattacaatgagatatcactgcatacccattaagttggctgctatcaaaaaagagtgaagtgttggcaaagatatggagaaattggaactcatgtgcactgttggtgggagtgtaaaatggtacagctgctgtggaaaacagtgtggcagtttctcacaaaattaaaaacaggattaccatatgatccagcaatcccacttctgggcatacacctgaaataattgaaagcaggaactggaacagatgtttgtacgcccatgttcacccacattcatagcaccattattcataatagccaagaagtagaagcaactcagtatccattgaaacatgattgaataaatcaaatgtgttatatacatgcaataaaatattattcaaccttgaaaaaggggaaatcctgataagtgctatgatatggatgaatctggaggacattgtgctaagtgcaataagccagtcactaaaagacaaatactgtatgattccacttacatgagttatctrgatttgtcaaccctcatggacagaaagtagaatggtagttgccagaagctggggggagggagaatggggagttgttatttaatgggtatagaatttcagttttacaagacgaaaaagagttctgcacatggwtggtggcaattgtagcccacaatgtaaatgtacttattgtcactggactgtacacctaaaaatagccaagatagtaaattttagattatgtgtattctaccacaataaaagaaattggaagaaaatatcagtggtaatccttcccaactctatagatacccctgaccctgctaatcccataggtctcaatgcacgattggttttctttataatcaaacttggctggtttctgtttattaaaaagatagttttaaaggattgtctgggtttcaggagtgtgtgtgtgcatcagtacacccgtgtgtyatgggttgggttcttgggctgcagtrctgagatggactctggagtacaagatgtttattaggcatcaacacctgtgaaaggaaggggcagaaacaggagtgggcaaggtagaagctggactttgaggtaggccctccaaagcttcacccaagccagtggggagccctgggttcattattgcctatctggattgttccgtgatgaatggaaacagcarcatcttgtcacacctgcctcactctgtaggaaatgaaagctgcccaagaaatgtatggtctttagggaagcagctcactggagctgaggcccattctcaagtagctaatggctgaacagtgcttgctaatcactatccaccttacagttgggaggccaagtccctccttgaagggcaacctggrtggtacatatctgtgcctaccacaatatgggtgtagacttcagccccaccccacacacatacctagatctagtttagcatacagctgtgatcttccagaatgacaggtaacccaggcaagatcatctgaccttttcatttatatcattttctaccatcaaaggggctatggactctgccaagaatgtagcaagccaacttgaccttcagaggtaaaaatgaaacccgaagacatggmgaaaattaaaccaactctttagcaaaatctagagatgaagtgagggcaccattggttcctgggtgttttaatagaatgtggaaatgtgaagcagcttccaaatgacatttattaagctcctagtgtatttgctaaatgatgtacaccctgctatgtcatttaaacctcacaacaaccctatgagcccagggctgttattatcatcaccattatatagatgagaaaactgaggtgcccaaggtcccagagctgtcaagcactgaggcagggatataaacctaagtagtctagtcctgcacagttttaactattccctgaggacctgaccatttttctgaacatatgtactggggacgttgagtgatgtaaccacgcaaaagactgcagcataggtgtctgcattttgaggattgaggcaaggcttctacacacaaaattataaatgtaataaacatacagcattgtccattcctgcgtgcttgcttatgaattggcgatggatttcagaaggagaagaaatctcctacagaagggactggtgtcagctgtgcctttacaatgggttaaagataatttgaattcattgccaacattcaaaaatgaagagattcctcattgaaattttgatagatggtttctttctttttttttttttttttaaagggggataatctggtgacatgatgcaccttcctgtgagctggcaatatgctgaargaagtgggtttgccatccttatcaaagggcccctatakgtgtctgagttggtaacctcagtggggccacaaaaataagacattatcttataattacacasttgcattttggctctctgaatgggaatgatggggaatctgcaagaatgggggagtacttctgttcaagtgagatgtcaagatttcaccttgcccatcctttttgattacctgtagtcagagggaaacatagcccacagagtgacagctctaccctcttctgactcctcctgtggcttttctgtagcccccactcactgtagcctggctacttagaagggatttaactaaaagtgagaagtgagattcagtggtgaaacatgaaactgaaaagtcagtaaaagaagtcatctttaagagtgaggtttaatgccaacttctcccttgagggaccttgtcacttcaagcctttaataccaggcctgacaaatatttagaaaatgttcaggacttaaccgttttgcacaaggagaggacatgatgccctgatagatttattttttttctccttcatctctagtatctgtgatcctctgaatcctggtaaggaaacaggtctcagaggctattctctgagcagtgtttggtagagagagataatggcactgggattgaagtagatcttcccagaagagagtgaaaggagataaagaagccatggctgcctgctcagggaagtggaaaaggaacttcttgatgggcttaaccttataaaagtgtgatctctggaggaaccggtgggcagtaaggcagagctgcttcatcaacaagtatttaagtacttaccgggtacaacatatttaactagggaaaatacatacttaaagatgactcagtcctttctcccaaggaggttacaatgtatctggggagaccagctgtactgttgtgaaatagtgaaataattatggaaagcctgtatggtactaatgataagaggtggttttcttttttcttttctttttgttttttttttttgaaaatgaagtctcgctctgttgcccatgttggagtgcaatggcatgatctcagctcactgcaacctctgcatcccgggttcaagcgattttcctgtctcagcctcctgagtaggtgggattacaggcatgtaccaccacgccctgctatttttttgcatttttagtagagatggggtttcaccatgttggccaggctggtctcaaattcctgacctcaagtgatccacctgcctcggcctcccaaaatgctgggattggggacatgagctaccgcgcccagctgggagatgagatggttttcttattctttcttttgtggaatagatctcttttttttcctaagtaaaggtcacccagatcccaaatatataaatataattgatcaaggtagcgcagctctggttraagtgtagaggcaggggctggaggtctgacaacmtagcccgcttcagtttcctacttccgccttcaaaggcacctttgccaaatctagggctcctcaaaaaacacacaggaagactggaaaaaaatctgaatgtgtacaagtacttttgcttgagtttcatgctatccctttggagagagagcattatcaatctccagtctcagataaggaacctgagacacagaggggttacacaactggatcaaaactctcaccgcttgctcattttggagctggcatatgagcccaggtctctaaacctaagccctctaaacctgccactccacagtagagcagatgctagtgtcccatgccagagtaagagatggagggatcaggaaggccttgggaagaagacacaagctgagatgggttctggaatctacttggaatttgagtctatgcagaggctaggaacgacattccaagtgggaagaacagcaggaacagtagctgggggtgagggaataaatgtggtttggaaaacaggtttgaattagtttgtgagagggttgcaacccaaggtaaccttgaactctgccatctagacaatgaaggcagaaacattgtagcagaatggggccaagaacacagcagggtttcaggcaggtttgtctgggcattgagggcaggttgtttgggtagagagtgggactggggtcagggaacctagctaggggaaagctgtaatatttcagcctggagcgaggaaggcctgtgctagttatgaaggctagaggggtggaggcttttcaaaagcaggagtgggacagcgagagtgaatgactgtggagagcagtgaggaaaatggagacaraatgacttctggaatctgattctgagagagaggatgggagatgatggcaagatgatggtgatggtggcaatgactgcagctaacatttgccccaggcttacagggtactaggcactgttctaggctctttacaaaggctgtctgacttcatctgtccacaaccttctggggcagatattactattattcccacaccaccccccsacaccaccaccattttacattgcagaaaacagtgcagagaggttttgtaacttgcccagagtcctataggtaatggatgctggaggcagtattccaacccaagcagtccaagtccaaacccattcccttcaccactgtgctatagtgctcctcatagaaaaacgtatccacataatgacaagggcagagaagacctttgcccaatttgatagagaaaaccagttctctcaacttttgtttacttgtgtaatcctgaatttctcaaataggattccatgggacatttttataaaagatctaatgaaaatgtttacagttggccctccatatccatgggttcaatcaatggaggattggaratatttggggggtgggggkaattgtgtttgtactgaacaagtgcaggcttttctttccttgtcattattccctaaacaataaagtataactatttacgtagcatttatattgtattaggtattatacataatctagaaatgatttgaacgatatgtgaagatgtgcataggttatatgcaaatactatgacattttatatcagcgacctgaacatccgtgcattttggcatctgagggaggtcctggaaccaatttcccatagataccaagggatgactgtattggttcagggaaaggtgacttaaaattaatcaggcttctatactccaggactactcagscatttttagataatagaataatgtgttctgagaattgccagatggagcctgtacaaagaagtgtctcctaagcaaatccaaaaaactgaactcttttttttctcacagaaaattaactgtgtttctccaaatactagtgttgaatggaatataatttagaaatgatagcatagacgtatagtgagtttaggactagaaatagcactataacaagtcaaatcttaccatgcgaaggtaagaaagtgtcttaattacaatcctgggccattctgcctttgcaggggcctcatttagtcatcactcagacttgcatcactgttcgggcccctccagcccagtgtctgcatttctcttgacaggtggcttccttctgaggccatgtgtaacacacatggcaggcattctttctccctagtaggaagtggctgcacctgttaacagcctgggcccaattactctcaaaaatttggacttcagctgccacactaaagcagcagtccttgagcctgttcagcccatactgatttgatttctaatgacactcctaaaaaggcaaggttctgmagttccattttatatcagggacttctttggcagaaggcaaaccgcagggccaagctcatatggcatgtgcagaggtcagccttcctgtaacaggaggggaccaggaaaggaagaaaacaccctgagtaggttttctgggtacttctgcatctgacatccttgccagccagctgccacttatgtcctgggtctcctacttagttatccaaaccwgcacaaatgtgtcaaaccagctctcagcgtttgaagggatagtgtggctcattttcttccttgtgcagcagtcacaaaggataagaatgcccagcctaacagtatggaatcgtgcaaaggagctcaacctgtgaaattttgagaggatcacagaatatctactcatcttctagtctcctgcagcatctagcaagaaactttttccttcccatttaagtagtacctcctagtccatcaagtcttcttgacttgagtcttctttgtaaactcatggggaggactccatcttgggcatgctgcrtttagtaacattcatggatattcttgatttaaggtactatggggagtgagggaaaatggttaaaaatctgggtgcccatcccaacaggacttcctggggccatttgggaaccatcccctcctagattatttgtgtccccttgatttactcttaagcgactagggctcccccttttctcctccctatttctttagtaatgtaccgcttggccaaaacttaatcatccagtattcaattccctccagatcttagaatttcattataggctggcaaggaactaatcaacttaatgagctagtggtcttcaagtgtgttggtatttctttctaacacacctcaaagagagtcttctcaatgcatattgtaatacagaggggtgattctcgtagcactaaattggaatcttaggcttatggggaagacatattgagagtaatgtctttaatcctcagagtattccatttactgcctcttggtaggtcaggacccagtctttcatgtgtgaaaactcggacacatctactcctagaacaagctcactcatgacaattcaggttcatatccataaaaatgtcaacaaattgtagcttcagcataaaggccttcttctttgtgtctttgcagtatagtagaaatggttcgcacaaagactctctttattatgaaggtaaatgaagattaggagagcttcatttttggtgcacaataacattagacataataggcgggaaagggtagaaagctccattgatgaagaaaggaatattatcactctcactttcttctgaacctaaacaagttctcaggttttgtttgacatccaaaccattacccaaattctaaagcttagtctattaaagagggaaagtggaaaatctttggtaatgactattttggcccaggctgatataagtcagagggcctttgatccatataatcgatgtgttgagaggagattataactcttagggaaagattgtctttgcaaagacagaagattgggttatttacacaacaaggtctgcatgagtaagtggtatctttgcatatctacataaaatcaggtcaatcaagttcagtttaaaaaacaacaacaagaaaattaccaccaacacaacatattaagtaagttaaaactatttgggaatgtgttgaaaattcactatttaactgctaatgatttgattaaattttatataggcaggaaagatacagaccttcatatctatagacttatgcattgatatatttttatgtgygtatatctgtctatctgttatagactgaatgtttgtgtccttcaaaattcatatgttgaaatataatctccattgtgatggtgtttgaaggtgggacctttgataagtgattaagccatgaggatagggcccctcaggaatgggattagtgcccttataagaagatgtcagagagctaacttcctctttttccaccacgtgaggatacagtaaaaagttgacaatctacaacctggaagagggttctcaccaggaactgaccatactagcactctgatcttggatttctagcctccagaagtgtgagaagtaaatgtttgttttttataagccaaccagtttataatattttgatagtcgcccaaagtgtctgtctgtctctctgtctctctctctctatcatctatctatatgtctaagttacctatctgtctgtctgtctatttagctaatctatctatctattgtttaacaaatatactctgccaggcacagtgtaaagcacctcccatccactacctcgtttaactctcataaaacatcatgaatgaaacaatggatttttctgtgatgtacaggagaacactggagtcagaaatcacctaaagtaaatgaacaaactaggacttgaattcaggtcttcctgatctttcagccaatgtgcatgaccattgcattgtgctgcctcctttttcctttctgtgtctctggatattgtgtggacatagatatggcaatatagctgtattagttcattttcacactgctataaagaaytatgtgagactggaatagtttataagtaaagaggtttagtggactcaccattcctcatggctggggaggcctcaggaaacttatagtcatggtggaaggcaaaggagatgcaggcaccttcttcacaaggtggcaggagagagagcacaaagtgggaagtgccatacacttaagccatcagatctcttgagaactcactatcacaagaacagcatggaggaaactgtccccctgatccaatcacctcccaccaggtctctccctcaacatgtggagattacaattcgagatgagattgggtggggacacagagccaaaccctgtcaatgaccttcatgagtataatagtgatttccatcagaagttttccatgggatctgttggtaaaaattcacctgatgggctttgtattagtttcmtagggccaccataacaaaatattacaaactaggtgtcttaaaaaattagaaatttattgtttcatagttctggagactagaagtctgaagttgtggtgttggtagggtcatgctctctctgtagcctgtagaggaatccttccttgcctttggtttatagcttctggtagtttgccagcgatctttgatgttccttggcttgtagctgcatcactccaatctctgtcttcatggtcacaagacattatgtgtatctcaaacttcatgtggctgtcttcttataagcacatcaattatataagtttaggagcccaccctatttcagtatggcctcatctgaactaattgcatcctcaatgccatttccaaataatgtcacatattgaggtagtagtgattaggacttcaacatatccatttgaagctgggggtggagaaggaacccagttcaacccatgacaggcttattcaattacaatgatttataccccagtgtaacttacccccatgtgattactattacttaatatgtcatatatgcttgtgctcagatatcattgcaaaagagtgaggagacctgatataagtcartattcatttaaaccagattagaaacctaatccaaactagctaaagtaaaagaaatgtcttggctcacataatcataacatgtagcattaagtcttcaggcacagctggattcaggggctcaaaggactcggagctcttacttttacaacatttcttgattctgtccttgcctgttggcttaatacataaatagtctttcactcaatgatagggaagatagcccctagcatccccagattcacttgcgcacatgatgtaagctgaggctgagttcttattgaaaaatttgtgtattagcctcggctgcagtaacaaacaacccccaaataaacaaatatttatttctcatttatgagtctgtggttggcagcacttcttcttggctctattctgtgcawctcttattccaagacctaggctgaagcagagaagccctcatcggggccatgctattcacaatgcagaggacaaaaatgcagaaagttaagccttgcaacctcatttaaagattctatgtagacatggatatttcttatctgcttatagtcctttgggcaaagaaagtcacataaccaagccagacaatgtggctggatgttacagataaggtaggggtgtattatccttttcttagagcaagaaaaaaaaataattgaggagaaaacagaacctagcacaatgaggttggagttaagttaaagacgtctggtgtcacaggctgtgactcaatggttgagaaatgattgggaagatccagaagtaacttttgcccctcgatttgctcccatggctcctgaaactgagggacagtactcaatagtctaacttaaatatagatatgaagtggctccaacaatcaaccacttaaggtacaatccaggaaaactggactccatgtgaacttagaatttctgagctaaacagcatgaactccctacagtgcacatcatgsgggggcaagtggatcactgggtaaggagtaatgggttaatttactcaggtgcagggataacatgttaactacccagctscttaggggaagtaggaccagtagttgagagtccccatttgctctgctgactatggctgcaatacacacacacttaccatcagcttttggccacawattgaatcccaggctaggagtgaaaggggagcaataccctttaaaccctctctatatcaccctgctttttggcattttgttttgttttattgttttcatttttcacagccacccctttccaccttaactggtctggttacaggttatttccaagcagaacccccattccctattccactgattttccatctcattcaggaggcagggcactttggagttgtagttacctagcaggttgtggctgctgacactgagatatgttaagtaacttgtggctctatctgggacagacagtcttatcgcatgaggctaagtcattataaggacaactaataaaagctgtggttgtgtttgtgtcaatgctggggtagagggtagtaactaagggcacaggctcggaagtcaaactgcttggcttctatttcagctttattacttctttgatcaagcttcttaacctttctaagactcagtgtcttcattcatcaaaaggagataatagtctcaatagttgccctgaggattcactaagtaatccacattaggcacttagtagactggcaagcacatggcaagcactcagaaaatgattattactgtcatcatcatcatcatcatcatcatatcaccagcatcacagataatgttgatgataattatatcaataatgtatcactaatacttcatatcagtaataatgctgtatagcataaatggttcacattcattgaatgctttctctgtgtcaggcacactgtttcagctcttctcaagcacatcttcacgagaaccctaagaggtaggtggggttatagcctcccattttacagatgaagtaactgagcccacactggtaacatcggatactatgcttcttgcaataacacagaactacagcccaaagcartgtttctttgggaccagaatgcctggtcttaaataccagcaaccccatcctgcttcattggtacagtcagacaaaagcagtcatactgttcgaagagcagtcagccttgagtccacattctatataaatcacccagtgaaaaaatgacccaattagacaggttggctgctgtgcacaattgcagcctcctggagtgcttaactgtaagtctttttgagggccagtgctacacctttgcaaaaggccctgctcatgggtctgctaggtggctggctgtgctgtggttgacctggcccacagataatgagggaatttatgtctgcagaattatgatattgcattgaatgtttagactagactatgaaagaatgggggagtttgaatgtttttcctataatgattaatgttaggcctgttggggaaaactgcrcactgcaaaatcccaaagatttttcaacaacctctgattgcttttggaatcgcaaagcaacattttcaggagacagttttgacatggcacattttggagtccctaaacagggagctaattatacatctacttagcattaaggatatctctgaatctctgagtgcctgaaaatgttccaatgaaagtcatatatttattcctggcttttatcccaaatgaaaaacttcctagactttcctcctttttcctttggaatatatattgaatttattttctagattttctccaatagaggaggtacaaaaataaatatttgtactcagcatttatgtcctgttatagcttctgattactttggttatcttagcagttgatttaaattgtcacagtaaactaagctattcttggtaatatcttcccagcataacaaagtttatttgccactaatgtaaacttttgaggggggggttgttttgttttgctttgtttttgagacagggtctctgtcacccaggctggagtgcagtggtgtgatcatggctcactacagcctcaacctcctgagctcaagccaccctccaacctcagcctcccaagtaactgggastataggcacgagctaattttttttttatttttgtagatatggggtctccctatgttgcccaggctgtcatataaactcttttaagggactggtggctctctagggccaattttcttacaaactcccttataagagatctattttctgtattgtataattctgacacctgggcctgcagcctctgtatcactgagacagaataagagagagctggagagtcatgtgctggctcttaaatactttggcctttaaggtagcattttcattcagagtcccttggccagaactggtcagagtatgctcacttatctgcaagggaacaggaaatggagcagagcacatggatattcatggaatagtatatgtcttttccataccaccgaatccagttcctctgcaaggatagtgaaggctaacagatcatgcatgctatcagtgctatgagtaaggcagcatgggagaaaaaggaggcatagattcttctggctgagatttacatgttttctcccacagatctaattttgaagttcgagggctccctgggctctcacatcctcctactgctggtgcagagatatgagaatatagaggcccatgaacactgaggcgctctaaggaaatctcatgtttaacctcccttaactaaaaccctgcattgcaaatatgaacctttaattagatgcacatagatccatatagaccaaagataagttttcagaggccaaggcactagaaaaaattaattgtgtagagattacttcaacccacttaatattactatccatagttgaaattcatgtcgttagttccatgttatttggccaaactagagtgattattgtaattaaccatgactttcttttggtacccaatgtgtaccatatacatgtaaaataaacatcattctgcatccacattttatcttttttttggttgtttcttcaaagtcattgtgcttaaactagagaggctttgaaacacaaattaagattttcttttttttcttggaaaatttacataatacaaaatgagttctgtgaataaatttgtcttgcttattaactaaggaatttggtaggatacacacacacacacacacacacacacacacasasagagtaccattggttaaaaaaacaaaaacaaaaaacctctacttcttaaaaaagtataaaacttaacaaactgtgtacttgtaaaggaatcacatatcatattggaaagagattttcccgttaagtctgccttaaccaaagatatgacatggctgaaatactgtttttcaatgagtggtgagttaattttcttggctcaaagatttaatgtaatttggtccaagaagtyaggcaagtgccttgtgaagtgtatgtgaaccgttgtatctagcgtctttctgggaactttgcatttctctttaagaagaagcaaacttcaaatagccatactttatcatccgcagccacatacacttggctgggataactttgcttcagagtataaagaaagttgtcaatgactaagagatacatcaaatatgctttgagagttatagcagaaaaccaaaattatattgatttcttagaagttactgaagcaacacagtaactttcattctaggttttcctacttagtaggtacatgccaaggggaaaatgtcttcaatcctggaggcaaagaaaatgtgttttactgctttctctttgtttcttgtttctgatgattattttttaaaaactatgaagatagaaaaaaggatcacagtctgacagagttcaaaatgaaaaatcaaataaaaccactatttctttgccttaaatatcaaatgatcagtcatgtctctacctttttccacagaattgaacatttgtattattccataatgttgccaaaatgtggcttttcattttaattttaggaaagatcaaaaagggttcttatataagtctcttgaaatggaatagaaatgtctccctaagtgcctctttaatgtgaggtgttgtaattcatctcgagatgagcaatttatgatcaaatgtcaaatttgcagagaacgatggattccaactacaaagacttagatggggcaaatggtagagagcaatccaacatgcattaatttaaaggaagttaaaaaatatacattatctgtagatcttcttgtgtttgtgcctacacaaccaaagtaaatgaaaactgaaaatttcagacaactgaaaactatttgatttatcacacagtggttaagaccctttggcatgagagaaacctgaatttaaactgttgccccactaattcccgactgagtgaccttgtccctttactgccctgtgcttcagcttcctcttctataaaatagggatacctatggtattcatgttaatgattaagtgatatgtgcctgtaaagcacttagcatagctgctcgcagtatctgcatttatctgaatattagtatacattcctatacatatttcattgtcacccagcagaatgacaattgatgtcatgttaaccacaccttctggtgccctataccacagtactttgtatccagtagacaatcagtaattatttgttgatgttctgtcatagaaatgtctgttatttttgccatctctgactttaaatgtgattctcttggcctgtgttattccaatttaactcagcagtttgtccatcatggttgaataactgaccagtccagtgaaaagaaatcagtcaaacttgttctttgactgcagggcctggtttttgctaaaatgtgaggaaggattagatgagatgctgaccgcaggtaacacaggcacagccttagtgggtggggtaccatttgtgctataaaatggacactgcatggcatgaagtcaggctcaaaagctcttagtaaatattggtttactggcttgttaatgactgacatagaaggcatcattgacagctgagttttaccattaaatatcactgtctttaattgtgtgagaggattttgaaatctgttgagggaggcatataaaaaagaaagtgtattatctctgagagtgcccttaggatgccataaggtggactaattatttgccaagtggaaacacagtgtaaaaaaatggttttattctaagacttgcagtaattatcaagcaaagccttactggagccatatgaggaatttggaaatgtcctggggtgtttttaattgttacattgatgataaggtcactactggcaattggtgggcaggggccaggcatgccacacatccagcagcatgtatgagacacacgctgagactcccgtgtatgagactcgygcgcactcgcgcacattgtgtctcctacaatgccaggttakgggctgagaaacactcttgagtattgaataaaggcactgaagggtcatttccccaagaagccttacacatacttaccaaatacccaccatatgcctcacacttagaatacagtgagtagatggtgagaggagcttatgttcttgaagcagccaataaacaaactgtaaacatagtaaataagtacaatatatattaggctaggaggtgaaaagtgcaaagaaaaaataaagaacaggttaaaccaaatggaagttgctggaaaagggaactatattacaattttaaagtagggtgatccracatggtgaaaccccatctctacaaaaaaattagctgggcgtggtggtgcgcaactgtagtcccagctactcaggaggctgaggtgggagaatcacctgagccccagaggccaaggctgcagtgagccaagwstgcaccactgcactccggcstgggtgtcagagtgagaccctgggtctaaataaataaataagatgatcagagtaggagagaataatgcagatagggaaccatactgtggaattaaactggagatcgttaaagaagtcgtgtttgcagggatgcttaaaactgtggcagaataataaagtgagtttcagctgtcaatattccttatttttagcaagaaagcagccttagggacattactataaatgatggataaatgcatagatggatggcyggatggttggatataaaatggccattaaagaatcaataagaatatcaacatttcctgtgctgggattcagtcactcagtgaattcagatggcctgtccttcaaagcttggcctagggtagattgggcaaatgattcctgagaccaatagtatctcagtccattgacttttttccmttctycacccaagacacctgtggaaactattagtcttctatagaatgggcttcagtaatgtgtaagataaactgaggccttcattcaaagcctgatcttaaactgtctgtgccttagacatggttttatagcctgagcatttttctgagtattcagtacatcaggtgtgggagcaaattgatattggagaaatcttcatggacagatgtggctaatgttctcagcttctctcthgtcctctgaggccaaaagtgaagtgaaataaaatagccaaagttgcaagaggatttatttctcctttgaaccacaacagaactcaactatccctctagaaattgaaattgtctatgataataaatgaaagtgccattaacacacactgaggctcataggaagtggttctgccaaaagaaacatccataaaaaagcatactcgaraagaaaatgacaaggtctgaaattaaagatcaaacaaatagggatgatcttcatagaaaatccatctggagaagaaatatgaactaaagcaaacaggcaataagacagcagcattatgcactattgaaaaagaatcaaaccctctgcaaatcagcargaagggatgctgttgaggtgctagtcagaagacagtaggaggccccagagggagactgcaacacttcaaacaacaaacccaaccacacaaaatgtttgctttattttaccaaaacatacacagtgctgcattttcaaaagtcctttgaaaacctctttgcagaagtagctggagaatcctaacagcaaagctcstcaatagggaaaagtgtgcaaaggcttagaaagataaccaaaagaaattagtctacaatggtgggggttaggagagggatgggtggaaggattaaggaaggaatggttgaaaagaggccgagagagaggatagagaaaagttagaagttggaaaccagtattggacatttaaactactttgaacatattgatttaacacactgaatctttgtaatattgatgtactcaccacatcttcctaacagaaggtggggctcacttctccctttagcaagtgattctttttgaagtatcaagtttcatccaggctaaatactcctgccagtgagaatgcaaaaggaatgtagtataatatgaaattcccccaatttatttaatataagttttgctacatggctgtatgaaaattaccaaagggcctatcaattcaaaggctggcctagttcctctggatactcaaaaatattattataacagacatgtattgagttcttaatatatgtcaggtattatgctggayacctagcatgtgctgttgctttcaatatacacatcagttctcaaggctgccaagccagtgcatgtaagatacgcaatgcaaggtctctgcctcaccatctaattagtttctagtccatgcctctattcccattcttttttacccctttccttcttctttaacactctctctacctccctccgtccttctgtacccctcctccaaccttctttccaaatatagggatagagaaagtctaagagttctttcagcagtgttttgtagttttccttgtacactctttcacctcttggttaggtatattctgaagtattttattttttgcaggaattgtaaaaggggttgagctcttgatttgattctcaactaggttgctgtcagtgtatagcagagctactgatttgtgtacgttaatttctatcttgaaactttgttgaattcacttatcagttctgaagctttttggatgagtctttagggtttcctaggtatatgatcatatcatcagcaaacagcgacagtttgacttcctctttaccgatttggatgccctttatttctctctcttgtctgattactctggctaggacttccagtactgtgttgaatagaagtggtgacagagggcatccttgtcttgttccgtttctcagagggaatgctttcaacttttccctgtgcagtattatgttggctgtgggtttgtcatagatggctgttatgacattgaggtatgccccttatatgccgattttgctgagggttttaatcataaagcaatgctggattttgtcaaatgctttgtctgcatcttttgagatgatcatgtgattttttttttaattctgtttttgtggtgtatcacatttattgacttgtgtatgtgaaaccatccctgtatccctggtatgaaacccacttgatcatggtggattatctttttgatgtgctgttggattcagttagcaagtattttcttaaggattttgcatctgtgttcttcagggatattgagtagaatcaatattgtgaaaatgaccatactgcctaaagcagtctacaaattcaatgcaattcccataaaaataccaccatcattcttcacagaattagagaaaacaattctaaaattcatatggaaccaaaaagagcccacatagccaaagcaagactaagcaaaaagaacaaatctggaggcatcacattacttgactttgaactatactataaggccatagtcaccaaaacagcatggttaaaaataggcacatagaccaatggaacagaatagtgaaccaagaaataaacccaaatacttacagtcaattgatcttcaacaaagcaaacaaaaacagaaatggggaaaagacatcctattcaacaaatggtgctgggataattggcaagtcacacgtaggagaataaaactggatcctcatctctcaccttatacaaaaatcaacagaacatgaatcaaggacttaaatctacgacctgaaagaataaaagttctggaagataatatcagaaaaaacccttctagacattggcttaggcagactttatgaccaagaacccaaaagcaaatgcaacaaaaacaaagataaataggtgggacttaattaaactaaagagcttctacacagcaaaaggaacagtcagcagactaaatagacaacccacagagtgtgagaaaatcttgacaatctatatatctgacaaaagacgaacatccagaatctataaggaactcaaataaattagcaagaaaaaaacaaacaatcccatcaaaaagtgggctaaggatgtaaatagacaattctcaacagacaatgtacaaatggtcaaaaaatatatgaaaaaatgctcgatatcactaatgatcagggaaatgcaaatcaaaaccacaatatgatactaccttactcctgcaagaatggccatgataaaaaaaaatcagaaagtaatagatgttggcgtggatgctgtgaaaagggaacacctctacactgctgatgggaatggaaactagtataaccactatggaaaacagtgtggarattccttaaagaactaaaaatggaactaccatttgatccagcagtcccactgctgggtatctacccagaggaaaagaagtcattatacaaaaaaggtacttgcacacacatgttcatagcagcacaattcacaattgcaaaaatatggacagcccaaatgcccatcagtcaacaagtggataaagaaattgtggtatatgtatacaatggaatactgcttggctataaaaaggaacaaattaatggcattcacagcaacctggatggaactggggactattattctaagtgaagtaactcaggaatagaaaaccaaacattgtatgttctcagtcatatgtgggagctaagctatgaggatgcaaaggcataagaataatacaatggactttggagactcgggggaaagcattggtgggggtgagggataaaagactcaaattgggttcagtgtatactgttcaggtgttgggtgcaccaaaatctcacaaatcaccactgaagaacttgctcatgtaaccgaataccacttgttcccccaaaaacctatggaaataaaaaaattaaaaataaatatatcactaaatgcagatcatttatatatttttttwaaaaaaaaactctaagaaccaggagcagaaggaaacagttgtaatcttggcactagatgctttggtggctggcacatggtggggcatcagcaggactggttgaatggctgctgggtaagcactggtattgaatgctgcactggtaagccagtcttgtttacactaccaggcactgttggagcaactgagggagaactctgcaaggcagaggtgattccagttagcatcccatctgctstgtgagagaatcatattgcayttcccagggggtgggtttgaggaaaccacatgaagaggcaaaactgcagctgtctccttgcagataatgggtgtggagtgttttmtatggaagccaccacaggacactgacaagagscaccaaatcctcagagcactctttacccmgacatgagcccaacaaagacctcttataaaagccaacatcagttgcttctgctttcacaaatattatcatgtttgttttcttctactcttctgattgctccttctcaggtttattcctttgccagtcctttaactgttggggtttctcagaatttcttcctcaaatatcttgcctctatgtttttccctctttggtctggtctgctcacctgaaacctgctctcatctccaagatggtggcgctcaagcttgacctccagccccacctctctcctgaatattagactcatatttccaaytgcttcctggacacctttatctgcactttgaattcagaaagtccctaattcgaatcttactcaccttcccataaacatcttctttcctttcatgacactcatcttggttaatgacaatcacccaagcctccaagttggaaatatgaaactggtaacttctgtttctcatacttttatccattcagtcagtcacaacttctgtgcttctgcctgtgttgtgtctcgcacattgttcttttctcttgccctgactcagacccccatcaccaccaccactctaaattgtcttccttccccaccctctgtgtgaccatagggatctttccaaagcagaggtctgcaaacatttgcaaggtacccagtgacaaatatgttaggctttgtgagtcatgagatctctgttgaaactactcagctctgccactttagcactaaagcagccaaagacaatatataaacaaacgagcattgctgtgttccaataaaactttatttataataataggtggcaggtctgatttggttcatgggatgtagtttgtcccatcctgttctaaatcgtgagacatttttctcacctacacatcagtaactcttctttgctaagggtagccaatcttagccctagctttgaatcagaatcaccatggtgccctggggcctaggcatgtgtaagttgttgtagtacctggtactaagttgttcactgtacatgcccactggtctgacagctgaggatatgttggcccaaagaggatgatcatttgccgaagattacctggacattagtagtattgttggactaaaatccaagtcctgggttctttgtacttctctaggctagattagctagtaaatgttgaaaatgaaaccttggttctcagcaaattaacaggcaaggtatatattcattgtcttagtccattcctgtttctacaataaaataccttagcctgggtaatttaaaaaagaagtttattagtcatagttctggagcctgggaagtccaagatcaaggtgccagcggattgggtttctggtgagggcttgccctctgcttctggcatggagtcttcttgttgtgtcctcacaggaagaaagagacaaacactgtgtcctcacatggtggaagggagaagggaccagagtgcttgcttcagtgtcttttatataggcactaagtccattcatgagggtagagcccccatgtcttaatcacttccccaaaggctcctcttaatactgtcacattgggtcttaagttccaacatgaattttgaagagatacattcagaccgtagcatccattaatagaggaataggtaaataaattatgaggcatctgttctatggtatgattccatttgtataatgatggtaacaacaaaaacaagacatatgactatgtatttagatgtgtgcaaatatacagaaaaatgtctggaagaacacgagcctgtctgctaatacggctacctccagggaggggaccaggactggagcagggtggtcaaagaggttatattcttatttctattttaacatttttcctatacaaataatttctaaaaattaaattttttttcaagaaaaagaaaaatagggatatagcactggtaattgtctccacaaagcaatatgaagtacagacaaacatattgtctcacggaaaataactgagagacacagttgctaagatcaggaatttgtgggacctaatttggtccaaactaggcaagaacctcgagaaattggtatgtaatttaggtttgtgttacagaaaagaattggcaaagaccataagagcataatgctttccacagttaaatgtgagcaacctccccaaatccagaactgtaagaaaagaacggtttctttgctaacccagtaggccatattgttaacagaagttgtatccgataaaagatctatgtttaaactataagatgcaacaggaaaaaagaaacacagcatatggaactgtttctacaccacttcaagtcaacagagacaatattttaaaaataaccaggagaattctccaggatgtttctttttatctctcttctctgcattgcgatttttactgactctgacacagagtagtcattgcaaaaaataagaagccgagggctagtgtcatatccatgctgaagaggtgtttagtttctttcatcaaggggcagctgggaaggaaagcatttctgtgtgcctttgccttggggaagacctgtctcctaagaactctgtgcatgtgatctgcgctgttgaaggagaaatgggtgagcagaagtgaccgcaccctgtaacttcctgtgtccaggagagctggcagtcggcccggtcttctgagacatccagtaaaaatgaatcccagttacatctgcggtgctcacagaaatagatctgctgtatctaataaaagcaaatgttactttttgtaaagggctgccgggtcacattcggaatggtaaacaagtcccccaaaaaacttatttttgaggtagagactgtgtagaatcacattttacctcctggactattatttacrtgtatcttactgtaaatgactcaggattaaggagaaaaaaacaccatcttcctttgaagagaaagaagggaagctggtgtttctagcastctctgcgaaaggtagagattccttccacatccgtgaattaaccccacttaggagtgggcaccctgctatatttccattcccaaaccttgcacacgctgtgttctcggggaggctgaacaagctgtgggtctgaattgcgtgtctggcttgcacagccccacgtgggccgaggggaggtgggctgattcataatgaatgctccgggtacttagagtagggcagagtgcaggggactgttattctgctttgaagttttctgcctccctctttggaatggatcaaaggcctcctttttttttctttttagaattcctataagctcttaatacagtgctctcctctcagttcccctcctcttctattgcaaattcctttcccaccagcctcagaaccagaagttgtgggtgtccacacagtggtctctatagtttctccctcccttcctctctttcttccccccagcctctcgtcctttgttttatctttcctttctttctttctttggagtgcccctgaagctctcagcctcagcttaaggaaaacagctagtggatctctgaaagtgttctgcagctcatttcttgctagcaaaacaagaaatatgagaatgttttttcttccctttttttaaagaaggaatctggattggagagataactgttgtgaataaaacaggtgaaactgacttgactagttgctttggaagccgaaacgaatgtgaaacaaagctcttctgtgcctttaaaaggctggaggatggtttctgaactattcctattgtagcttctgaatttgttcttctttttcttttttcttttctttctttctttcttttttttttttttttttagtgacgggtgttgctctgtctcccagggtggagtacagtggcacgatcagaactcattatgcagccccgacctcccggcctcaagtgatcctgcctcagcctccctgatgtcatagccacagcacaggaaatcatactaaaagtggtcctcctgtgcaatgccaagggacagttccacacacccgtttggtggatagtcttacatcccagatggctcttgttccaactggtaataacatgtaacatgtgagcatgttcttttgccaattgattttcttctgatcttagcaaataacctatctgggatagcaaacctgagaaacaggtacactaacaacacacacaaacattaaaattacattaaaatcttaaagccttaaggcaactagtttttagaaaacagaggatcttatagatggtaatttagaaacttaatgcaaaaacaccatctgctaaacctcctatctacgaagacgctggggtctgcggagagcacagcctgtatctggagttagctccatctgcttctacctgctccctgggaatcttcttcactgaacaaaggtccacttttgtttaggtcccacgagtttatactggtctagatcaagatgctattcaagagtctgtccatcccaccctgggtctcttgcttaagtctcagtcacttcatttggaatatgctgattttctgaagatctccagaggattcattcagcaaatgtttcctgagcataagacaatttgccatatcctgaaggggacgtaaatgtgagaaaaacagggagtatggttcaagagaggggataagatcgttcaaggagagcaaagttgacatggtgagaggggtacaaagactgtggaactttagggaatagaaatctctcagttgatctggtaggataggacttgattgtctctgctcctaccttctattgtgagttcatgctccactttcctgctccctgagcacctatcactgtctgcaaacaatatgcacttaggtcatcccagatggctctcattcccactagtaatgacaggtaagcatgactcaggattctctgtcacacctttcctgggacctcacagcatcacatggaatgttccttcttttatctccaatcatgccaaggaagaaatccacagtattataaacccaaactcactgtgattgttgttattattgtttgtttaaatttttaatgaacgcaaaaagtccacatctaattggcaaaaatcatattgaagatgacatatgtgatgataactgagtgtacactgtgtgccaggtgtcacatatcattccatggaatcctcccaacaagcccaagagcaaggatcactgtccccatttacatagaggaacttgaggcacagaagaactcaccagcttgcccacagtctcacagttattcagtcttggctstcactctctgtgagacacagcctcccagatccaggacttgcagaaaccctgggcaggcctttctttgtagtttttgtcaggtaagacatgccaagtgggcaagtgggtttttttgcttcatgacaacaaccagaaatggcaaaacattttctgttatgctttgaagagaattccatactttttcttggaattcactttccttattatttctgcttggctctagctgatttaaattttttttttatttctataggttattggggaacaggcagtatttggttacatgaataagttctttagtggtgatttgtgagattttggtgcacacaccacccaagtagtgtacactgtacccgatgtgtagtctttcatccctcacccccctcccactcttttcccttgagtccccagagtccactgtgtcatttttatgcctttgtgtcttcatagcttagctcccacttataagtgaggacatacagtgttcggtttttcattcctgagttacttcacttagaacaatagtctccaatctcatccaggttgctgcgaatgccattaattcattcattcctttttatggctgagtagtagtccattgtatatatatataccacaatttctttatccacttattgactgatagacatttgggttgattccacatttttgcaattgcgaattattctgctataaacatgtgtgtgcaagtattttttttcatataatgacatcttttcctctaggtagatacccagcagtgggattgctggatcaaatggtaattccccttttagttatttaaggaatctccacactgttttccatagtggttgtactagttgacattcccaccaggctatagatgattttataaaggctacattccctttccttccatagtggcctgggctgcagctccaggccaaagctgaagttaaaaaaacaaaaaacagacagacaagacctcattcccaggcagccagcaaagcaggtaacagatgtggatctagggatgggccaactcttaatttccattatgctcaatccaggttctccgaagcaggtgaagtgatgtaatccatgtgatatactaagcacaatattcacacatggtaagtgtacaatcagtatcacccatttctatgaatagtgtggctttatgctcatgagctggaatgtgtactcatgactgttaagggatttgctccttcactctgcagtgcaatgatcttatattttttttcatatttattcccccactgcatggtagcctttgtgagaacaggaggacaagcagagtcagcaaagggaactacmcaagaaaaggcaatttccagtagaagaaagtccaaagggaaagggcctctatattgggagctccatgagagagggactgtcttttcaagctcctagcacaggccggatgctctataaatactgaaggataataggggagaaatattatgtttaaaagctgtgtggcctaggaaagaaataggacctatgtggggacaagggatggagtccacttggtcctccactcctaattataaagggtctcaaatttcgacatttgatgttatttccaaatgacttgttgaatgtcttatgtgtgctaaagcatgaacttcttaaatatagacatttataaaatacaaccaaaaacttaagctttatcacattcttttattttgtaaaatgtcagcagcctcaaaaattgccatttggaaacacctgtcttgacccagaaacctgtctttcactcaccttaggccaagaccatacgtgctctggcacctggtggccaacaccaaactgttggccgtcatttatttcttccagatattttgaattttctgactaacttgtctgaaatacaccacagacgcggagcattttccaacaagtctgatgttgttccatctcagttttaattctgaagctgtgaatacttccttgaaataacagcagcacatcttttctttgctcaaatcctccttgtttaatttgccaaggatagcaggctttctcctccctgaataattcaccgtcgggtgtgtgtgtgtgtgtgtgtgtgtgtgtgtatgtgtaaatttttttacatagagggcagtcggatgaatccgtccttttagaattgtcagtgacagacaactatgacatcaggtcatttgtgagcacaccagcccactgatttggcatctcctagcatcccacaccctgctaccatcaccaaaccaccattaactcttgtacctcagttacccccttcatagcctaaccataggccatgcaggaacaatgacttatctagctgtttattgagtcacgtgtatgcccaaccccgcaccaggagctaggaatacaactgtgtgcaaggcatacttgggtccctgaccttttggtggggaagacaagcttcccctcacccctaaaaaaccatcctaataaataagaatatctttgctattgcaaaaggatcaacaaaaatcttgcctcgtgttaaattcttgacaaccctcccagcttattcttaattctttaagctcttttaaaatcaaccttcctgttccaaagactacctccaaatccttgctctatcccctctcaaaaatccatgaatttggatcccagatttattattaagtaagcgttccaggaattattatttctctcttcacatgctgtgctctctgggagcacaaacagtcgccttcttaagctggcaggaaagaatgcgagggtacgtcctcaggcgaaccttatcgagagccagaagccacacatttccaaggtgtaaatatgcagccggtggtgcaggcctgggatgcagagccccatcaaagtgttaacataaaataaggttgacagtgccacttcatcagaaacaggcaacaaattagaygttatgaaatgcttataagcctagggagtaaggtgctcaaagacaattaccaactaaacatttcattaatgaaataatgattaattgtaattactaattaaaattcaggattatgctgttggttttgagcagyaacaggagtaatgacattaccatttttaatggaattccaggaatgaaaactataacaactcacagaaaagatatggcttgcaagcgtgattaggacttactgttaaacccaggggcacggaattttccctgctggtgaacttaagtaagtttaatgtggtgtaatttaattactgagcgtagttttcttctcagtgggaagagataccaggtttatgctttaaagaacaaaaggaagaacataaatagctatgggtaatgattggctactagcaggaaaaatcaaacagcatttaactgtcttttgcataacatttgagggtagatgcatcctggctcggttgcaaattttatttaattaatgcttagaggattaacaacaaagtagcccatgcagacagggaatgtagtcctgtcgagtgtacaggaaagtgaatttccataggaaggacgtctccactgaataattaatgtgcgtgcattttcataaatgtcaaattcccacaggaagcagaaacttgaccctctgtaataaaccatttaggattcattaaatataagcatcgttcttaaactgtttgccatggcacatgagctcatccataatgcagcatgctggccttagctgcaacataaaaatgcccagcgcttggcttttaggcagctgccgttaccctgagtgtgccgacttcttccagtctgactcagatctagcccctgtgggtgagctatcactcacttctttctgacttgtataaggccaagatcagtccagagtcaatctggaaagctaacatttaactcttcctcaaagacaaggagggcctcagaccctgtttagaccttctgtatcagggttccatgacattggcactagtatcctgtggggccagatcatctttgttgaggagtgactgtcgtgtgcatggctgatcgtttggcaacattcctagtctctgctcactagatgccagtagcatctaccctctcccaccagttatgacaatcaaaactgtgccaaacattgccaagtatcccctgggggcagaatctcccccagttgagaaccactgtgtatagatcttactggagtgtatccacctaggtaggatgagctgccacggggtaggatgagctgccaagggggcacaaggcttcctattcagctgggcctgtgaggctgtgggaatccataaccccttgtcaccttcacaatcacagccatccacaagacsaaatgtgccttgctcttgaatagtattaactgccccttacagatccaaatgtggctatcacagtggcagtaagtgcgccattaaaatgaaaaccatttactctagtgacccagagctgtcttatatattcctctctctgcagcagtgactgtttccttttctttatgtatcaaaattactagcrctgtgagcaacccccaccattgtcctggacttataaggagtccagtaaatcactaagtgattttctttttcttccttcctttctttctttaaaaaacaaaaataaattttctgagattagtatgggaaaagaaaaagcaaatgagctcacccgtggaaatttttatcccaactgtttctaaagtctgaaaacaaatcacattttttcttttaatagaatatagatttgatttcttgattttaaaacatgcacttttaattctgtctgggcatgcaggatgcccacatgctggctaaaaaaagaaacacgaagctatttggagaatcactttgtctacacaaaagcagaagctgatttgactaatgatttttctcctctttgatttttatttgaatcaaaatgagcagttagttatatcttggcaccccactgccattgcctctgcattctcctaaaataaagaggatttgatgtgcttagtacagatgtgttatgagagggtgacataagtgtgcaagggcatccttgacgttgtgttgtgtccatgtgacatagtaactgggcacaactcatttcacactgagaggttgagactggtcagttattggaaacccagagcattctgattttctcttgtgacaacagttccactttggcctgttcataaatcacactggcttgagagcagaccatcacaagtatgttttctttctagtattccactttcaacagacatgttttaaattaaccagccaaacacagttcaagaatcagaaccagtgagtgaaaagtctacttggctcaaaacctgactcagtcttattaattcagaaagcagaaagcttacatgcgctaattaccaaagctactaattagctttaattataagcttggaaggaagttgaagtgtgctgcattcgatagtgctgttgaccttttcagtgtactttggagggggagggtggagaggcataaaggaggtgttataaaattcatcagagagcaattaatttatgtcttctgatgaatatgctataaattaacacatctgtgtatatcagaacataaaggcattttaatggagccttaccagtgtcaactctgagtgccccagccagccaagaaaatgtactcgtttggtaagttatttcttattctaccgctattgtaaaccatgtggcaaactgcatccagccaggtgcatgcttctatttgtaagtcataattaagatagggggccagctttgattgatttgggagggtcactctgaggagctgcccttgcagacatttcatgaggtgctcagaaatctgtttcatgccaaagtctggaaatactgtccccattggtctctcaccagggtcttatttgtcactctctctgagcctctacagcccaaggctcaaaccgtgcctttgatgtggctgggatgctccatgctgtttttcatgtggtaagacagctcctccagtaytcctcctcacacaaatgacgatggctttcagggaccaccagtacagcctttcacacctcagaagaccctcctcaggccccaggagccctctcacaatccccgtaagaggcacctaaagcagaccagcatctgcttgctgtgacttgtaaactctgagtccccttatcctctagatttgaagcttctttggttaggttccaatctctcaaaactgacgtatcccctaktaaccaccagagggatcccatataatgtgataaaaattataatcaacatggaggaatcacagctcagccagcgtgtgcttgcttccaaggccccaggtctctcagcctggaaaaggagagcggggaacaaagraggaacamtgtgagggaaggttctccttggcagcttcggggaagggatcctcaaaggagaggcacasgtctgaagacggaagtgtctgaggccaatcttctcttctcctggaaacaagcaaacaaataaaacaaaccccagtcattacaaagaaagccctttgaaaatcagtgaaatcagaccctatttgtttctaaacccgtgttcagaagttgaactccaaatataatgagatttttttgtgagaactaagagccttttccatgtttcaaatagggttgtacaattgtataaaagaagagggaattgggagtgtattatgttagcttcctaggactgctgtaacaaattggcacaacatgagtggcataaaacaaccaaaatgcattccctcccagttcaagatgctggatgtccaaaactaaagtgtcagcagaatcatgctctctctgaaagttctggggaagaatccttcctttccgcaatctttggccttctttggcttacagcagattcactctagtgtccgctttgtcttcacatggccttctgccctccgttgatgtccttataaggacaccagtcacggaatttagggcccattctaatccagtatgacctcatcttgactaataacatctcccaagacctctttccaaataaggtcacattctgaggctctaggtggacatgcatttttggagagcacactcttcaacccagtatgtgttccttaactatttatgtaaacaacatttcaagtttaagccctagacacaaagctgggctgatactgtagttctaacatgatttccaggtcttgggatgaaatccatgatcaccaccgggaaaatgatacttcagtcaccgtgggtttcctctctgctttttaaaatatagtttttcaagcacaatgcctctcctctaagctgttgtaaggcttctgtcggagagtttttggtgtcttttgtgtgtgagtgtgtgttgtgtgaagtatcagaagacattgtttctaccccgcagtccctttgtagctaattttattgccctcagctgttaggtcttatagattatccccgagcctattgggccaaatcggtgtagttaaagctcaagccatccttgtttatccctgttcttaattcatgtctggctgcccaaacggccaactgaaactccagatcagctcagcagaaagctgtatgttcaggtcaaacatgcttgagtgagaagattgtctgcagtgtgtcaggcaaattggcaagcaagtgtcaacagacccggaggtgggaggagaatgaaaagaggggaaattagcaaaaggagtggacgtggttggacctgagttttaccgtagggtagagactggtcatcactggcagaggtggggttgtggggaaaaagggagatagtcccaggggcttgtcagagagggcctccatctccaggtcagaaaagccctgaagagccagcctttcaagcccacttcttgttcagaggcccctccgcaatatccctaccatgtggacttctagccttggcctgaattcaagcatcctaagtcattaccaagccccctttcaaaccacactcttcatcctgcaattttcattatgttaaaaaagcatctgcttccccagacactaaaggccacatattgtatgattccatttctatgaaatatccataataggcaaattgatagagacagaaagcagataagtggttgccagggactgggggggtaggggaaaggggagttaccacttaatgggtgcagggtttcccttcgggataatgaaaatgttctgaaactaggtagcggtgatgtttgcacaacactgttgaatgcactaaatgccactgaaygatatactttaaaatggctaaatggtggattttaygttatgtgtgtatgtttcaccacagacatataaattgctttcttccgatccacccactagttatctacstgctccatgaaaccaaacaagtttaattccttttccacggcccacgttgttaatgtttctttctcstgtgtttgcggaaaccatcacgcacccccaccccatatctccacttctcatgactactcaccstgtgtcccagaaktgtgcatctttgaaacccctgatcctgggtaccctccaatggatatatccccttttctcattccttttctgaaattatgctgctgctgggatatactgctgccgaggaatatggacagcacatgctacagaataatcacctgctttggcctgggacttggaaggtctgggtcctgactttaactctctgtgtaacctgaatggtaaacaaatcattcagcctcagtttcttcacctgtaaaatggaagacaagagggcttccaaagccttttctgactttcagacttctaacccaccacatagctctggaccttattcttgctgatgacaccccatagtgtgttcctgtttggcatccctgctatgctactaatacccactgagctgraagttaaccaggcaggacatcttcctcactagggttaagctagatcttccgcaccccaacccgcaatgtgtgacattggatttggggctccagatggaagattgcactaggatcctgattaaatgctgccccataagatggaatacaacattccaaaatgtaatttttgatcttcattgcattatctaacctatgtatatatctcttattttgctctcatagagaaatctgtgtgtgttctcaggcaagtcccttagcagaattttggataagagagggatcacagccagagtcccatactagcccactgaagatttctattctggtgttttcctcatctccagaagtatggcaatggtcctgtttatcactgttctgtttctggaactgtctgagctgagactaaataattaatagaggggctttctgaagatctttcccttatctttttcttgatatgaggactacacttgtattttggtggtttgcatttgattttgttgttctcattgtttctccagtgataatttggtttgagtcactaagaggacacccccatgttccacagctgcattctaaccccatacactgkggagatacacatatatatatgtatacatatatatgtatatatatatataaaccctrtacccatatatatatawgatttgctcaactgctttaactcacttgcagtaacaatgactgtggatggtaggagagagtcaagcaggcaaaattctccttgatgggaattgccgctggggatctagaagctccacattcaaggttttgaggtagccatgaccagtctaactgtagaagtggaacgaagcattggaaagagtataaatttagagctctaagaactaggttcagtttcttccatttatcagctttgtggccatagtcaagtgtttgtctccctgtgcctcagttaccttattacaaaattagaaccattgtgaggcttaagagaggcctaaaaattaactctaccatttacccctcttgccacataacacatgtaatgtcctaggctttacaacatccattttcatgtagattattccccatgatcttttttttttttttgagacagattctcgctgtctcccaggctggagtgcagcggtgtgatctcggctcactgcaagctccgcctcctgggttcacgccattctcctgcctcagcctccggagtagctgggactacaggcgcccgccaccacacccggctaaatttttgtatttttagcagagacggggtttcaccgtgttagccaggacggtctcgatctcctgacctcgtgatctgcccgcctcggcctctcaaagtgctgtgattacaggcatgagccaccgcgcccagcttccccatgatctttaaaagtcaccaaagaggagaggggagagaagtagtgtctacagagtagcatacccagcatcatgctcagtacatggttaaccctcattgaagcctcagaatagtcctaattttgtagtaaggtaactgaggcacagagaggcaaaatttgactctggccacaaagctgataagtggaggaaactgaacctagttcttagagctccaagtttacagtctttccaatgttccattccatttctacagttagactggtcatggctacctaaaaactttgaaggtggagcttctaggtcaaaaaggatgtagtctaatggcaataaactggggacacttagcacagagttttgttcagattcttcyctgtgacccyttgtcttcagagataagaacattcctttcttcagggcacctctccaatgagggtcttctaacctgccgcaaggacaaacagggagcgaacagtcagaaagaccttcctacttctgttaccttctcacattcctttagctgaaaatattcactatgccaaggtgccatattttggggaagcatgtcctgaactccatcacttttatctttaaaatgcagattgcattaaattgcctttaatattcctagtgaaattagaaaacttggggataagaacaatcccaacacctggtcctgggcttgactgacctttatctctgtcttcacaagctctgaaggagtaagtgcccacagagcaggacacgccggaaagggacactttgagtttcttattccgtgccccatacagcctcccactgcttcaagctagacagaggaggactctttctccctctagagacaaacccaaggcctggaaacaaagcaaacagaatggccgccttagctccctctcccctgaagcctacactagactctaagattagagcactccaataccaagtaagtacaggtacctgtctcgagagagcccaccaacctgggagaaagggtggtttccccaaatgcttagtgcatgacagtcctcggctgttcgctctgcactttctaccgtggggcagctccagagatcacctgacttgccagttcccagaaggcagagtcagcaaagggccttctcaggagacccaagtggcagtgagacaggaaaatagggtctgcaggcagggaacataaggctgattcacacttgagstatgacaggggctatcctctccatagggcatacgccaagtaaatgacttcataactttacttcatcctcttcatttacatagggcatacacccagtaaccaatggaaacctctagaggctatttagacccccaaaaattctgtaacggggcccttgagcccctatgctcgggcccactcccaccctgtggagtgtactttcattttcaataaatctctgcttttgttgcttcattctttccttgctttgtttgcgcattytgtccagttcttcaagatgccaagaacataggcaccctctaccagtaacagcagtaccttcttcttcaagggaaaacctakccttatgggataaagagacagacagctattgaccttgaaatggggcagtgtagataatgcatagtccattaaatatcttcaaacttgaccgacgcctggcagtctcttcctggatttaagtgtaggagtgtgaggaggagccataaactcttcttgtgggtttcataatttcctactctcctcaaatgaaccagagacaaggacataacctgatggtcgctctgcgagatgttgctgagttctttccttgctcaagaaaacagaatatgtcatgatcaagccacatcaatgatgaatatgcacatcttgcctgatggcagactgctacttaaaatgctggaagccctacccctgagaaccaggccccaagtattatgttggcgcagaagtaattgcagtttttgccattgaaagtaatggcgaaaatcgctattacttttgcaccaacctaatayattcattgctaccgagmatctacatgccccggatgttcagggttttttgtgcctctttaattctgatattttttattttatcccttctttgagatgtcctttactgaagcaaatagggatttattattacctggcaatctcccttaggctgtttcgttcaggcttggttgttcaaggcaactgacaaaaagaaatttggggaacaaagccaytttgctttgttgggtcacctttaatagcttgaaaaggtccagaacttctttacttagcagaatctcctgatgactttgctaagtgaggagcgagatgcaggttccctttaaaagcctgacatctttccacctttgttcatacgcaaagtgttttctcaaagtgaggccttctgcctttgcacatcccccactctaatgagacccgtgctgccgccaaatcacattcggagaccgttaatgcarcaggagctggcggaggtctcttctccatggaagcamrcccgctcacccaggtgaagagcaacagcactaatgagyaccaggagatgatcttaaaacagaatccttcgctggccccgtrctcgcctgtaaggtcctcattctttagtcttctttctgtccctacaacttgggaaaaaaatttacctcgtccctgtctttataaattgggrgggatatctcagactcttgactttaattcagataattaatgtactgagcttttaattgagtgagtgggagggaaggasatgtgttttgccagcttttaaatgtagcggaaacataaacgccaggtttcaggattaaaatgaatgatcagtcaaccaacattcatcccgtgcctggtatgtatgcaccattcagctaggcagcgctggggatatcacagggcaggcatggcacctgacacgtgtcttcagggggatgcagtcagtcaagtagaataggtaagatgtatacycgtatcactacagttcaagatagaaagtgttccaataaataaataaagcccctaatttcagaggacagattctttggaatatcttttctctattctcactgcttgtaattcagaccaccattctctctccctaggattatagcagtagtgamgtgactagtttctggccctcaatgaacacctgtgatgtgctgggcacataaaacaattgtcacgcgtgtccatgtgaagagaccaccaaaccaataggctttatgtgagcaataaagctttttaatcacctgggtgcaggcgggctgagtccaaaaagagagtcaaggaaggcagatggggtggggccgttttacaggatttgggtgggtaatggaaaatcacagtcaaagggggttgttctctggtgggcaggggcgggggtcacaaggtgctcagtgggggagcttctgagtcaggagaaggaatttcacaaggtaatgtcatcagttaaggcaggaacaggccattttcacttcttttgtgattcttcagttacttcaggccatctggatgtatacgtgcaggtcacaggggatatgatggattagcttgggctcagaggcctgacaacaatgaattaagagaaatgggccaaggataagaaggagtattaaaaggaaactgttgggaactagagcacacacaggcttctgtctgaatagggcagacgctttggctacagttaattattgccaagcagggtaggggaacctgagccactaggtacacattttttttttttaatacaagtctaattattttttaaatcttttaaacactgcataagccatacagagcattcagtgtgcctgagctggcctggcacctgccatgtggcagcctgtggcatatactacaccaaggtgaatacactaaggctgaggtgactcagagaatctttgtggaaggrggagtatttgatacacgtttggaagaatgggtgtagtctggaaaatggctttccaagtaaatgagagagtgtgaacattaggtatggacctagggactttgaggttgtggtcagaaaaagacaaggactcaggcggctggagaccagggtatgagcaaakgtcagagggcatgccatggagcctcaggccagaagggtaagtggaggccagatacccgagtgacctcaagtgctggtcctttacccactcgaaacctcactctgcttgtctgtacagtgagggtggtgacacctacctcccagagttgttggaaggagctggtgggattatgcgtagcgaatgcttggtggtgtatctagcattgatacagagcattgggtcaccctgctgtttaataaaatttaggcttaggcttcattctcctcacactgtggcactagtgaagggcttcttcttttgtttttcttttttaaagtctatattttcacttatatagggaaactaaacattcagaaatgtacaaagaaggaaataacaatcatctacgttctcatcacccagaattaaccaaggttaacatcttgggagatttgtattggcatccagtcttttatttttaagttattcttgattttgcaaaaacaagaacaaatccatcacaaaaacttgttaaaacacagcaaagtacaaaaatgaaagcatttaagcctaccatcattacattaggtgcaaatcatttcagacagttttatgtgcatcatatataaaaggatgactgcttcctatagggttatgggattgccataaggattaaataaggtactccaggtgaagcattgaggtagcacaggcctggcatacagtgctcaataaatgttgggtcatcatagtcagcaaatgagcaggtacagctctgcaacactacaatttctgtatcatgtttcacaaaagtctaatgttcaagttggatccacctttcaagatctttccctacccaattgcaaagaaatgtacaacaactctttgcgatgagctgggaagggggagatgatcaggatccttgggaatttcacgagctgataaaaaagagctccagagacagaggagatcacgaaatgtggcctcttttcttcttcccttccctctctcaccctcccctttcttctctccccctcctgcactcctgtcctgttgtggtttaacactcagccactgcaatgctcagaaaatgcttacaaagtcctcctagttacatttaagaccccctttctcttcctgaggaagatacacactgatcccagagttaatgagtattgattgtgacatctgtcttcaccagtggcccaagaaaggggtgcacatgctggctgcctatggttaacagctcagttgaagacaggaagcaaattagctgttagacggtggtcctttgcacctgaaattcattatagctttaaactcattttgaaaatgtgtcttgtaactctctgaaccaggagtaaaagcccgggccacttggtgagaaacctgttttgcttagtgattaaaaaatctggcactgcctcattctttgagctttgcagaaatttgcaatagcttctttttaccataaagcaggtgtgaggcgaagactttgtgtgtgtttatgatcattatgttgtattaaagagtcgtgttgagttccagaatgagaacaagaaygctgcatattcctctacctgcaaagcaattaaattattgtctgacatgtttrtaactccagaaccagtaatcagcttttagtctgaatagaggacatggcrttataacccagtgctttgctgagaggttcatatttagcatttgcatttgataatttaatttaaataataccgagcaagcacagttacacttcttggcaattgtcgaagtaacagaaaagaatgcaaagcacaggctgttttttgtaaacaatttttgtattcctgaatggttttcacttccttgatatgaacctctgctgctcttgtcgaatagactagaaaatggtaggagcctgtaaagtctcaagtattatgtctctctttgttccctttctcctcttcccacaatatctgagcaatctccaaatttccatgtgattgtgaaaggcctgcagtgaaccattttaaaaaatcgcccccacaagggacttttttcttgcaagacaccgttatgtattatagatcaattttctgataagagtctgtttcagagaatatttggtaatttcagcaaaggtaagtacttgccacaggaatagtgaatcccaagttaatgcccaataatatcaccaactaaatgaaataaatggaagaaagrrtctcttctcttccctatccccctccaaaataaagtttatgggatgatttcaggatgttcatttctaggactatctagctatcatatttctttacccaatttatttacttcaaggcacaggtgccagctggtttccagacacgttgctgtttccactttctcccctccccttttcctctacttctcatgaacaaaatatccacagatttcttccatccctgttaggggagtttcagggccttccccatcacaggccttgagaaaccaaacgtccgtgccctaaggtatttttttctctgttgygcttggctttatagtcttgcccagtaggacctgcataagctttctcaggcaccacatcttgcttagaactcagggaggtcaaacaaagtctttcatttttactgtgcctcccacttcccaagacctgcccagtcacccaaaatgctgattggttgcaaatatcacatatgtaagtctatgtacgccttcaaagaaggtttattctactaagaatggtattttctgagagatgttgtttaaaactgagttaaaaaaatatttaagtagatttcctagtgtttctagaatcttccaaagggcaggaaagggagtaatcagtggagaagtgcagcttccctttggtttgtttagattcagcatgtctgggcatgcacaaggctttctgagagttcaccaacgtggctggaggttagcagaggctaccctcccaatcatattttaaatacgtccaatgccaactgagatgactctttcctctgaagaatagcccttactctctgccagccacagtgtttgttagatatgtttcatctgaaatctctttcgaaccatcctaaaaaccacagagtcaaacaactgtggacttcatcaatccattttccagatgctgaaactgaaaactgaagggagctaacctgcccatggtcatcctgttgggaaccaagttactaagatctaatgcgggtcttcccaaacccaaagcctatactgtttgcacagcctcacagsctccagccgctacttctttgtgtacattagcaagcgttctgtcagtgtataatgtgctagctacatctgtggccttggcctttgatcaatattgaccacccctgaattcttgtgaatcctggtatatctgattatgaagagttgtaggtacccaagcagcaatgatgcagccatacacagtgacttgcacatttgaataactcacagaaccatagcattcatgtgtctgagaggaaactcttggtataatcttctttcctcctgctatcttgctcttctagtgagaatttacctaaatcgtatagcactatactagagtttaccttagttcatgttaagatctatctaccgttagtgattaagctgaggaaggagaggtgataamacattgctgggcggcgtaggtgcaaccccttctgctttagtatttttctgagctgaaatactgtcttagatattctagatgaaatactaccagccaaaaagggsacatgaagaaggtttttggtttaggaggttatggttctggcatgtttcccagtagggtggctctgagaaatggagccatggtgttgaagaggaaatcaccaaaacacaaatgggcagcctctttgggaccctaagcagtgctccaggcaagttgaatatactgttcttgtggtagtaaatgttcaggttcttcacaggaatgaggctgataaaatcctgtgaacatggatacctcatcacagcaaatgtaacgattttcatttgttttaattctatgattagttctgttaataaaaatgtctatttaagctatttaagacacccactgaaatgctatcatattaatttcacggaaaaaatccaacggaactatattagtttttcccccatgaaggtgacattatggacttttaatggcactgtcagcaataatggtttttattgacctaattattaaatgaattaaaatctgtctcaatgccttgacaattatataatatcggcatggaggagagagccacggtgggttactgtgtgatgaaacaggagaaacccagaactacatcctccttacatgcattggttcatccaaagaaatgacaaataatactctagtttcattagatgtatttgcctatcactatttttaaaatttgttaagaccaggcacagtggctcaaacctgtaatcccaacattttgggaggccaaggtggtcggatcacatgaagtcaggagtttgagaccagcctggccaacatagtaaaaccccatctctactaaaaatacaaaaattagccaggcatggtggtgggcactcgtaatctgagctatttgggaagctgaggcatgagaattgcttgaacccaggaggcggaggttacagtgagtagagattgtgccactgcactccagcttgggctacagagcaagactctgtctcaaaaaaaaaaaaaaattgtaatatcaaaataatactttgtggtgacttataatattaaacatggaaaacttctctgttttccttgtctgtcttacacttttctcttttgatgatttccaaaaatagtgttagaactttagcaatgatgttaaatatatgatgaaacctatgaagttttctaattagtttttaatataaaagtaatatcaggggaataaatttttagagtgcaaaggaaggagagtaaaatttcaaatctcacttttccagaagtaccattgaaagtttgaggaagctatttgtaaattattgattttgggcttctattaatatatgactttatttttggcacagatagcaaatatgtgacacccacgcctctaattccctctcccaagtcagacatcattaagggattgctgcaccctttgtcactgagaatactgcagtcttggaattcatctcagggctgtgcttcagaaaaacccagaaaaacccacccagtgtgaactgacatagraattgaaccctcctttgcatccctggtgattactcacagttataaaagcatcttcatagacacatacacatgaatctcatttgctcatcaaagaaatgctgtgagagaaggaggacgaggattatcagttctattttagcagacagaaaaacaagacagagtaaggaagtgaatcagagagctgcagtggtttatggagtcacaaggaaggcctctttgaagactgacattcgaggagagacccaacagaagaagaacgtacatgaaaaacctggaaacagagtgtcacaggcaaaggaggagctggtgtaaggaccttaaagaggaaaggaagcccttgtgaccaagggagagatagagggtctgggggtgttgctagagacccgcaaatgggtctgggtggcccagagccagggtaagggatttgcatttcattctcattgtactgggcaccattagaggagatgaaaggaatgacctaacgccatatgtgttggacacaggctagacataccgcatcttgcctcaacaatatctacccaatcagtagacacagttttgtcttgaaagcaaattagggagaatcatgtcttgctgcaggtgcacacttctattctgatgaactcagaaggtggcattccctgtctccacctctttcctatagccatggaaacctatcccaagaccagggataaaaccacacagcagggcgcactcagtcgagttctggtagagacaaaagcaaggaaaagttcattgtgtgttccatcaacgctgagcagcacaggacttcccgcaaggagaccggtacataagcctgtctgaactaataaggggaggcatcccctggcagccactttttccaatccgatggagctctgtgctgcacagcggggcacctcttaccttaatcctgaattttttacttyttatttattaattgtattttttgttttttgagaccgggttttgctctgttgcccaggctggagtacagtggtgcaatcatagctcaccgcagcctcaaactcctgggctcaagtgatgatcctctcacctcagtctcctkagtagctgggactataggcacccaccaccgtgcccagctcatttttgtattttttggtagagatgaggttttgccatgttgcctaggctgtcttacctaaatccttatcacacaattaaacttaycctcactcttctcttttggtttgctttaatccctgtatcctttatgaatacagccttattttatataaaaataagaagaaaaaatgttatggtattttttttttttcgagacagggtcttgctctgtcacccaggctggagtgcaatggcacaatctcggctcactgcagcctctgcctccagggttcaagcagttctcctgcctcagcctccctagtagctgggactacaggcacccaccaatggccagctaatttttatatttttaatagagacggggtttcaccatgttggccaggctggtctcgaactcctgacctcaagtaatccgcatgcctcagcctcccacggtgctgggattacaggcatgagccactggccagtattatttttaatactgctaatgactgcctgagaacttactgtatgctagaccccatgctacatgctttgcattgcattctcttcatcctttgaggtaagtaagtaagttccattattatgccactttacaggtgaggaaactgagccatggtaaagttaactcgtgcttatctaagatcatactgctaacaagggtagggtccaggaggtttaactgcagagtctatacgcttaaccaaaaaaaggccttccctcatactgtcaaatggaacaaatgtgactgaactttggaggaaactaggcctagctttgagagctgtctcagtttcttcagctgtagattggagcttatgatggctctgacctcaaaggatttggtgagatttaatgagatactataaataaaatgcatggagagtgcttagcacacaggaagtgctgttacaatatcacttgggctctgggcctcastgccctgatgtatgacatggragataacagcagctgtctccgaggaccactgaggggcttaaaagaggcgatacatataaaggtgcatataaagcgcctgcacagggcctgatgttttgccaggtggtggctacttttgttaatttaagaatgagtgatctcttgaatttgtggcctccatagcaaatgaaaagtagcaatggaggaaaacccactggtatctcctctgtaagtttcatctctgaaacaggaattagcaccattgttaataacatgcgagtatctgaatttgagttgtggtaatgttcgtgtcctggtgcgttttcaattggtgccatttcagaaggaggcattygtgctataatggaaagcttcagtgcaaaacgtctgaaagaaagtctgatgtctgttgtttcgtttaagtcaagttctgacaacggtacgttctagagaattgcagatgttctcagatcgtgtgatatttctctaaaaaccatgtctgatgtttatccgctggagcaatctggtatgatgaggaggataaggctctttttttcatggtttaaaaaaacccaaatgtctggctaagcttgtgagaaatagcctgagtatgtggcagtgagattaatggattctcacgccgtgtcccatggaaaaatgctccccaagtgttcctgtgtgaaatrctgtacctttgtcacttttggggatacatgggccgggccttagctaaaggcattgctaagcctcagtgaggagaaaatgacaacccctatcctcactgggccagctctcaagtgccagatctttttccctccaaagccaaactcccatcaatgaaaaataaagacagaatgatttcatctttcaaatgaggcaatgaggcaagcccttcactctgtaggttttaaaagatttaaatcaactctttggtttaaagtcctgtcccctcacttgaccaaagtcatgtaaatcctgcatttccttacaytgtcttcggaccatgcttggaaggaaattttcattgaattctcgcaaggactgagcttctggggaggcagtgcgagaggggaagagggggaaggtttgagtttgatgagcackggtctggaagccaggaggctcaagtctctttaccagtggccatgtgaccttgggcaaggctggctcctcttgtcrtctttggtaaaacaagggacctggacaaaggttgccttcatcacgaacacagtgtcaattctgactttgtccttcctctcttgagaagacgatctacactttctttctggcctgtggtaaggctgtttcattagttggcctgaaaaacaggctgcttcattatttggcctgaaaatttccctactgcatttttaatgacctacaataggtagtcattaatagtagcttcttacctggagtcctcagacagggtctgaaattagatgcaaaaacttgagtgtaggtgaatttttaaggggtcagggggaaggctttgcaattttcatttatgcattcagtgaatatcaaacacctattctctgccaggcacagagctaagcaaggtaaaraaaatgatgatctgggcagatacactccctgacctcccagagcctggaaaaaggaataaacaagcagtcacagtgcaggcggatggaggtacagtggggtaaggtggaacctgtgaggtgctattggagcttcagagaggagcacatcacccatacttcatcagattttcaaggaggttcatgacccccccccccmaaaaataaggacctccaaactaaaggaacaggaatttgatatgatggttgggtgaacaacatatatagaaataatgatagatggacaaatatgtttgagatgttcattcctacctaatgaagcatccaacacaaaattggatataaamgcttgaaattatcatgattgttgtcaccacaatgacagttaatatacattgagctcttactatgtactagattcttgttaagcatttaacatctgtaatttcctttaattgtcatcaaatctttgtgaggcagtatagtcctgttttacacatgaaaacactagggctcatagacgttrtctgttcagggcctgtcagtccaccccaccaccccagaaatgtggcaaatctaggatttaaacccaggtctaggtgattcctaagcttctcattagtacagattttcacaattttcagatcacagtgagggtgtacttggaaccctcaccttccaaatagattggaaagtcatgtttcttcaattgttttgccagacaggaccaaactttaggttaaaaaatcaaaattttgcatcatctgtttctttctatagtagaagacattctyttctaggtagactttgagaggccctcaattaccagttgaaatggagacggtttaatatacctgttctgaggcccaaaaccctccatggggttcaaaggagaaacaaagctctaagggacttatgaacaatttaacatttccaaagcacctaggattagtcattccatttgacacagaataccatagccatgattaaaaccaagacatagactaccatagccatgattaaaaccaagacatagactaccatagccatgattaaaaccaagacatagamtaccatagccatgattaaaaccaggcatgggaaatccattytggggctgcacagctcccactgtcttattcttagctgccgtaagctactccttgactggctgaaggccattttctctcttctggttgaccttggcgcccctactttctgggtgtctttatgaggtcttccttcttctatgagagtttgatccaaaagatacatagcccttattgacagggtyatccccaaaatacctggccttgtggaaatgtccttgccctakaattgcaccgtttttttaattcaacaagcctttactaaggacaaggcctatactcagcattgggaatacasaaatgaatcacccacatttcatggagtacatgctcaatagactgcaacatakagaaattagagaccctttgcaagttatakaaacccaactcaacctgccttaagagccttaagagaatgagaacgagtttattagctcatgtaactgaaaagtctaatagtattgttgattcaggcgcggctggatccaggggcacaagcaatgtcattaggggctttgtgtctctctgcttctctcaggcaacctctcctcagggaaggtaatgcgaacaccagcagccggaggctcacatcctactagcttatggtagaaagattgtgggtttcccccaccccacccccgctgcttcagtaatgcctataaaaactttgcacagaccaygctggcccaagttaagctacaggatcattgctgagccaataaccatggccagaaggatagggttccctgagaggccagatctggattatgaacccatcccaaggccagttagaaatggagtcaaccccatccaaagcctgaggaacaggataattacccacatgaaagagtagttccgtgaagagaaggaagcaaaagaaacaacacacaacaggcctaagtacgaagcattaatggagcccaggcaaagtcagggagaactcagaaaggcttcccaaagatgctgacatttcaccagagtcctgaagggtgaatagaagttcaacaatagtacaggaatgtgacctggagttttgtcctgctttactaatgctccaataggaatgacctcagaaaataatattcattcattcattaaaaaaaagtttacttagcacctaccaaccatatagcagggactatgttagtgctgggactgtgatgatgaacaagacaggtagtgatttggctctcrtagatattacagtgttggggagacacatattaaataattgcacaaatgttaaaaaaaaattatccttttcctaagtgcgtaaaaagagaagagcattatagtagggttacagcacactgatgcctgtgtttcagttttcctaactataaaatggaaaaattcttgttttctcctcctacaatcaatcaatatcaataatgcaatgatgaagacagatgatttatacacacacacacasagagagagagagagagagagagaaagagagagagagagaagcaatgaacaccttgaaatagaaagtaaaagttagggaagctgctcttactataattagctggctggctcattgcatgccaccttaaaatgcctccttttcctactgtccaaatggttaatttgccctctacctcttagtggtcttgactcagtgcaccgtgtccttaaaccattgtatctatgctaagtacaaaatgctatcacctgccttttattatttcctcctrtgaagcaattggggttcaagaaaatgctttttggtatggaagcaaaggaaatctggaaatgctgcttttaaactactggccctattattgaacaatttacagtaattatactattttgtacccaatcttgtcacaaaaagttcccattttagaatctgctcttacaggcatttccaggggagaggaatttcgctgctcatttatacactcctgaaaatagcagtggataacagagatgagactacaactgcaaatggcactgctgtgatgaagtggcatttacaatgggaagctttgggagtgatgggagaggagtgccatgtttgtgcagagtcacttttatgtggtggcttcgattcyttattcaatggaagccagatgcttacagttaacatttttaatgggttcactttcccaggtagctcataaaatcccactaataaatcaaagggcccttcttaacagaatttcaaaggatgctagaatgtcactgatgtattaatgagttaggggccctgaaaactagattcataatttttctaaagtgtccactccctttcctccctataatgcatcccctaaaaagactagaaaaagaattcagacataaatgcctcaatgtcacaggctagccatgtgttttccacaagacaaaacgagttaccaagaggaaaattcctgatttaaaagataccatttcaattctattagaattttttaaaaataaaaggcaatgagttaagtgagaataagatgtaaaccttcctgcaatatttgattgctaatgaacagaaagtattaatcttagcaacggagaagagaaaaatgcatagtgtttttcattaaatcaactaaatgattaaatgagttagtcagtagaaaccattttaattttctgaacgtgaaatgtgcagcttataacaaataaattcaaagcacctttctaagcaagttttgaccataaaaaatgtgggttataaagatgtttggtattttcttcttcatagatagtcaatattttaaatgcagtgacattaattgtgcagaatgaaatgcccctactatctgggcttwaaaaagttggcatccagtgcaaagtccctaatggatcttcagcactattacaaaatgatagattgttgtcatagtcattttagcagytttcagagctgttatatttttaattaaattggctgtgaattttttaagtagcaaaggttgataaactagcacgcagtgcgatatcactattcttcttagcggggctgtcatagtggtacatttatgtgcataatcttcttaacattcataagtctctttggtctcaggcattgatctgcaagattacttgctgtttggagatggggtaaaaaaaaaaaaaaaaaaaaaaaaaaactatgaactcagcaaagaacgtggttctgagacattagtgggctgagaggagacctagcctcataaccccactgtaaattggcctaccatcttcctttcttgtacctcatcaataagagaacacagatgtgggtggcaggttaatgtgcaaattcttctaccaacaggttttgagaggttcctgtgagccaggccctgggctgggtgcagggacacaagggtgagtatagtggaagactaagacactgatccaactgaataaatagggaccaattcagagaagtactgtataggagagggccaatctagaatgaggatcgtagcctgcctttagccctgtttagggaaacctgcctggcccctaaccacaggaggcagggaagaaaatgtgttccaggcagaggaacagcatgtgcactggtgcaagggtggcacggagccagtctgaagacctaaaaggccttggggctggagcccagagagggagtgagatgacaggggaagtactttctgccctggatacagcatctgcatttccaggaagtgcttgggagttgactggccagccatagggatagctgtcaggatgattcaattgaggcaggatgttcaaatgattgcagttcactagaggagggcagcctcgccttgggtatgtgtgacttctactggccatgaaaaagtgaaaatcaaagcccaggagaaatgatgggagaggggaaaatgtggttaatagaatgacasaacgttagggcaggaagggtccttacacattgtgtcctttgctaccatcaatttgcagactagaaaggtgagccccagaagggccaatgtcacactttgattggcagtgagaaaccagcctactttgttcttaaaggagggcacttcctagaacactatgtcacttcctcagaacttctcattttcactctacggtaaaaagattcccttatttatccagcacatagatggtagctaggaagggtttgtagaaaacaagataacatagcaggtaagaacatggaggcagagccagagaggcctaggtttgaatcccaactgaaccgagtgaccttggcaggatacataatctctaaacctcagttttcacatttgtccaatgggactaatagtagtgcctacatcattgggttataaatattatgttatccttcttgcaaagtgcttcccttgattcctggcatgtagtaagtacctaatccatggtaactattatcatctcagaacaattgagctaatcaagagatccgtgaatgaattatcttgttccctttgtagaaaaagaaaatggcattttacttttcataaagagggagaagcctttgacgtgwgtgtgtgtgtgtgtgtgtgtgtgtgtgtgtgtgtgtgtgtgtgttttgccccttgtgcttctggtatgcatgagaaatttcacatttaggctactggctcttcatgaggacgtgacttcccattggttcatgtatcctgatagttatgggtacgtgaaaaccaacaaataatgcttaaaggccacagataawgaaagtttaaccacaactcaaagagaaaaatgctggctttagtttaacattatttgtcatggaaataattcaagatttagagtcatacagacctgggactaaatcctggcttggtcacttattatctgggagatattgagcatgttagttaacctttctgactctcagtttttcaacaccaaaatgaggaggataatatttatgatatagcatgttatgaggttcacctaaaagaaggcaaaatrcctaacacatagtaaacacccaacaattttggcttttctagttatacagaccagccctctgataattcccattgaattcaccactgagaagggggtaggggtgcactgaatcccattcagttatgcagcctttgtttctaaggtagaaagtggatgtcattttcagcaatgcaaaaatgacctccacaccctcacataaagcatttgggtttggcaccttgatttcwycaatraggtgttcgcagcagcagccacaggaacagctggagtattgagggaacctcacaagacagatgactacatggggagactgtattagtaaaaattgtgtgttgagtaaacatggcagttactktcaatggcataatctccatagtttccaacaagaggctgtgcaaattgcaaaggagggaaaagaatatctccgctttcctacattgaggttacagatgagccacagagcaaccatttgyatttgcaggcaatttccatcattctgcatgcatgctcaccctggcaacagttgaaagcattattccacattaccgtagtattttatcacgcatcgcacgtctgacacagttctttccctggcaagagagtgcttccggctaagtttcagattttgtcagtaggaaaaaggaattgttatgatccagaaatggctagggaaacataccttcaagtgctacaaatttgtaaaggtaaagctccaggtagaaagaaagaggagggacaagcaagcccatgtcttgccagcttctgtgtgttttttgcattagccagtgggggtcaaattctgacactttaagtggtgagggagatggaagctgcaccccaagtaattcacattattaactcttytgtctctgttgtccaggaggaggtgggtcagcatctttattggcacggattatctaggcatctcattctgcctttcacttttggtgtggcccagacctggctgaaaaggatgataagtttccctccttacccccatttcacccatcaagccaagatatatttacctggtgtcttgtttattctgccatgctgcatgtcagacactgcagaaacaacagtgaacacaacagacatgatctcagagctcacaggcgccatgacagatcctctaagcggggtgttgaaggtattagcggagcgcataggtggggcactgactcaaattttggcggggtgacatctgcatcaaactccaaagattgcatgagagattacaaggaacaatccaatgtctcctactcctgcccactccaccttcttagcctggctgaaggaygtctggcatatgagagcatgctgcaaatttaagtaactccttgtttcccaaataccaagcattaatcctggtatttgccatgtctagaaactactgctactactatttatgtttcttcaagtaaactttctttttctacctgaatacatgcactgaaaaaggaaagatgctgccaggtgtagtggctcacgcctgtaatcccagcactttgggaggccaaggtgggcggatcacttgaggtcaggagttcagcttggaattaccagcttggccgacatggtaaaamcccaygtctaccaaaaaatacaaaaattagctgggtatgatgatgcacgcctgtaaacccagctactcgggaggttgaggcaggagaattgcttaaaccctggaggcagaggttgcagtgagccaagatcrtgccactgcactccagcctgggagacagagtgagataytatctcaaaaaaaaaaaaaaaggcaagattgcatcactaatcacttctggaatgttatactggaaacatttataatatgccataaataggtgatatggttcggatatgtgtccccaccaaatctcatgtcgaattgtaatacctagtgttgaagggtagggcctggtgggaggtgattgggtcatgggggcagatttctcatgaatccccttgatgccatcstygtgatagtgagttctcatgagatctggytgtttaaaagtgtgcggcaactcccctctctctctcttgttgctcgggccatgtgacctgtctgcttccactttgccttccaccatgattggaagcttyctgaggcctccccatgatgccagcatcatgcttcctgtacagcctgcagaactatgggccaactaaacctcttttctttataaaytaccctgtctcrggtatttctttatagtagtgccagaacagactaatacaaaaggtaactgtaaaagtaagtacaatcaaaaataaaatagtattattaaatgccaactagattctatgttggagcctgaggcttgttcttttctaacacaagaaggttgatcaataagccttggtgcaggaaggacaaaggagcaccgaactgactttctctaggagagagcacaaggaagaaaaaggatgttgaacctaaagaatcactatgtgattcaacattttttaaggtcgtgactgcgttctacgtaaagccaccttctgtgcctacctacacagtggtggttagtgtcccacactctgggaggaaccaggcaagactggtccagtggagttggaccacacagttrtaagtaatgaaataacaaaggcaatgtatggctttctaggccttgttaaggagttgggattttatccgaaaagaatggaaagccagggaagctagcagatggctgactagcaccctctgactagcaccrtctgatttgcatttcaaaaagaccactcaccttcagtgagagaatggatactgagaaacaaggctggtagaaggtagagaataggctcttgggagaatccaggaggaagaaaatagtggcaagacctagaagaatggctgcagggagggagagaagaagaatctgttaaatctcttgattgactggatgagggatatcataggtgctcamaaatgttttctgagtgatatgactcacagacctttaccctagaaagagcaggtcggtccaatcatttttatatcattttttggccaagaatcctgaagcgttgcacctgtgctaattgaaaagtacaaatagtcaatatcatctttcaactcggtccccactctcctccccagcttcccttctgacttcctatttaaggtttctagttcattcacatgactcagaaataatgtctgcaaaccagggagagrtgacaatgatgtagtctcctgtggttccttacaggaaccaaagcgtcagggaggtttcagtttcccccatcactttccacttgtcccaagacattggtttttcactggtggggtgtgggggttgtggcaaatcagctcccccagaggatatttggcaacgtgtggagatgtttgtggatggggaggtgtgtgctcaccacatcaagtgggtggagaccaaggatgctgccaaacaccctacaatgcacaggaccacctctctcaactaagaattatctgacccaaaacctcaatagagactgaggttgagaaaccctgtcagaaagatggaaatgtcagaaagtgcctgstgatggcagagagagagggctgtggtagggcaagtgcttctattgggacactattatttgcttgttttgtttcgttttgttttttgtgagatcaagtctcgctctgtcaccaggctggagtgcagtggcatgatttggtctcactgcaacctacacctccggagttcaagcgattctcctgcctcagcctcccgagtagctgagactacaggcatgygccaccacccccagctaatttttgtatttttagcagagaaggggcttcaccatgttggccaggatggtctcgatctcttgacctcgtgatcttcccgccttggcctcccaaagtgctgggattacaggcatgagccactgtgcccagctattatttgcttttaataacctgtgtactattagaggtttgtgtgagttgtgggccaggaggatggaaacaaattcctctgggtattctgggatcagagtcagagccaggcagccaatcagaagaggcagcagccccagactggacccctactccccagacacctagggatttgctaaatagcagagactttgaggtgacttctgtggggagtcaaggtatatctgcaagggcaggtcactagcaccatggtaccacagcaagtgtgttgaaattccagcaatcttcctgctgtcttggctagtttccaagcctgcccagaaaacaagcatctctgtttttagaagatggtagtgatgattactttttcctgggggaaaaaaaaatgccagaaagataaatactttgtaaatcactgcatgcctcctgcctgcaagcttggagtctgtttgtgagacatttrtctccttgtgtactcaccccccaaaattatcatttaattaataaaactaatagcctgaggtatgctgatcaataagaaatagaatggacgaaactgaatcggatgcatcatggtattgaactgtctgcagaaagctatgagcccttcctcttaaatgaacgtgcttccagtccactgagatactgagagagyggggctgaggtgttcctgctgcatttgggaagttagagaaatggcatgtgcagatatcctgttctgattcatgagtgagatgagcactgagtttctctttatttaatggatgtagaggctgtggatggaaatgagttgtactttcatgtcaactggcagctctgttttcaacttttgtggacaaaaataactctatctttattacaggcacacaacaacccagtagttaactacaaaatccaaaattcaagggaaaaaaaactctgattagacaaaattgatggccaggcgcagtagctcatgactgtaatcctagcactttgggaggccgaggcgggtggatcacctgaaggtcaggagtttgaaatataaattgagagattttcatatacttctttaggaatcagacagatctggtagataagtcaggttatgtaacaagtcaacttcaaaggtctgttcttcactataaaytggaagtctctgtctctgtccattgctcctcttcacattttctgagtgttcctccctgagacatctctgagaggtctcctaaaagctagattttagacaaatgcaaatctagagcatatgtsrtgatagcaaagggctcctacttggcttgagcaccagagtctcagtgacggcttcaacactgctatcataactttagaagcaaatggcaacttgccaaggttaccccatcccgtaggctgcatcttttctctagggcctaggacacaaggaagcactaagctaatcttcatctgggaccaggtagagataaaaaaatgtcgtggtttcaatacccagcaaatgcatccaggctgacattggtaattaatgttgcacaatgaaaatatcactaaaatgcattagcaggatgaaatccataacttttgccatctctgggaccactgggaatccttcctttgtgaactcttgggccagggattatcctttctttgaattatagtgaaatctgtcttaagtgatcatttagggaccatccaaaattcgtaacttggtagaagttgaactttagctaaaggtcaaacaaaattctcctggaagccttaggagttgcttaaaggtgaaataaaaaattgaaatgaaaatggacttaatccctggtttatgaacygagtagcacagctaagaaagttaagggaggcactcacctcacagtgcactttgacttatctttctgaaatgcctcatccgtctgtcaagtgccatagcctttctggcttattaatcatgcacttagcaatgctcttatttgctaaggatacccatatgttttgaagacctttggctgtgcgcttgggacccatgacaggggtgatgttacaggtcattctaggtcaggccttgctcacagtgcagggaatgcagcccaccaatgccttcawgatcctacatgcctttttctaagggaaattggcttaaccaasattagcattggttcagtgtaaggaggactttctttaaggtagtttataatacaattttatttgtattatattctagtttataayacaaatgattatatttatattatatcatagaggcctagcatagaaaacaaaatagatatataatttatcttctaatcctctctgaagcacttagaggagaatttgtagccatcttgaggtatctgtgttttagatcaagctgctataagagaatataaactaaacgggttaaacagaaacatttatttctyatggctctggaggctggaagtccaatatcagggcgctaacatggtcggggtgttggttaggaccctgcttctggttcaccttcttgaggtatcctcacatggtggagagaaagagctctggtccttcatgtccttataagggcacaaatccatcctggggctccaccttcatgacytcatctaaccctaatcacctcygcgaaggccctactaacaaatatcttaactggattgtggtgttaatgaattttggggaagtggtgggggcacacacattcagtccataccaccctggaactccagggattaaagctgagaagtcagagtggaagaaggtagagccagwgtgctctcctgattcaytcctgtacatagagaaggaaccagacacatggaatgcaaattccagttgcaacacattttgtagcttggactgttcactgtaatccactgacattctacttcttcatctgtaacaagaacaaagcaatcctaataccaatcactatcatttattgggcccgttacatatcaaaccctaagctgagctggaactttacctacagtgtgtcttggtgagttctcaccttagcatttcaatgccagtgatggtgtctccatttgaggagataagagtgtctatgaaagattgaccaaaaatccctacttgtcagggatcctgagaaaatccagcgacatggcaggagacagccacacacagggacccatagatagtgtccatttctatgggaagaggggtaaaatggactttcgtggaactactatgaggcaggctatgcttgtggctttcacccaccttctgcctagcagttgtttcaggaaagtccattttactccttttcccaaagagatggaygytacctrtgtgtccgtgtggtcatgcactttagaatccttctcctctcatgggatggsagtttccttacmatttgtttatccctcatgtatttatcgaacagtgctaagtgctgggagcatggcaaggcactgaactggctctgttgtctactgcatttcaagtcaaaatggaggtgaaggaaaaagaggtacaggattggtcccatggggagagacactgacttgaggatttcctgataacctcgtatgcccggatcagtgtatcaaggccttttattgttctgtattactgattactacatatttgggtagtgtaacttagcttataagaagaaactggtgttttgaaaaaatgatgttttcatgaatggaaggcatacataccctttatgcctgcctcatgtaactaaagccttatttatgttaatggcaaatggagctaatgtagcacacaggataaatcatctcagctcagaattctaattgaaggctccctggaaaccaggcagacaaccaccacaaaggcaacccatggacaaagcccaggaatggcttatgtacgttaaggtttgattctgttggcttcagcttcctggaacctgcctctcggtacctgtccagaacaactctctctcttcccttaacaatatatacgtttctgatcacagtggtttccaaaagcacccctagagtctgagtggcacctaatgatggcatctctttctagaaagtctttatgtccaagctaatgagccaacaaatatatggccaatgtttcatggagtctgcaaacttggatgtgattttcttccctggctgaagtcagggtaatgccaagctattagcttaaacttaaatcagtacaagtaatcagtagtgcccattctcttcctttctaacagtggaataagggcaggtccaccatctggtataggcattagccactttgagttagtctttgtcaggttaagtatattcaaatccatgtaactgtgaggtttcttacaaaagctagttgattcatgggaaggagtaaaacaaaagactagcaggaaccccaggtcagcagctccaggtccactcactgttttctaagcgctttagaaaacttaaggtaaataataaatctatgtttttctccacaagacccttaaggttcttatgattcaaagcctgtttctctacatgacaagcctaaagtactccccagttctttagaagggacagaagtctctgtcccaggggttgtccagttgtggcccacatgccaagttggacctgctgcttgtctttgtaaataaagttttatcggaacacagccaagtctgtgtatgatctgtggctcctttttcactacagtggcagagtatttgtggcagagaccatatggcctgaagagccagaaatagttactctctggccctttacagtaaaacatttgcttacccctgctccatcctaaaatggggaaaaaagtttaaactacatgctacaatacaagctctatgaggccaggggccattttggttttgttcacctgtgtattaccagggcctcctgggttatggtcattcaacaaatggaagattttagacttcctcccactccctacaagtttgcgtcacttttactctttatccattcccctcccactgactataggattgaagtcccagctttatcatctgtcttcaatcttacctcctccattagcattttgtgagcttctaaataaatggtgctcttcattcagtagatacttattgatccctgataaarttccaggcactgggggatagaggggtgaacaaaccagatcagrcccagaccgccaaagagatyactctagtargagagacagaaaaaaccaattaaacacacagacatctcagagagtgagaaggaaatgaaacttggtatgataaagaaagtatttatgcatatgaatttggttagaggggttagaaaaggcctcaccaaggaggtaacatttcaactgataactaaatgagaagctgtaagcccggggaaacctggggtagagagttttctaagcagagtgaatagtgattgcaaaagccatacatccaggatgagcatggcatgttcaggaaacagaagggaggccagtgtgcccggagcattggtgagcaggcagaggagttgtggttaaagaggcagacggtggcctagaggtcttcagggcctagcatgacattagagttagaaggtattaggcaagggaatgacatgatctgatttaacttttaaaagggtcaytccctggctggattaaagagargtaaaagtgcaagcaaaattatcacagtggtttatatcagagatgatatagtggaggtggagagaaataggccctttgggatgtgccttggaagcargtagaatttgttcatggattgggtgcaaaggctcagaagctaagaagaattgctggtttttggctcragtaaccagctggatgatagtgctatttactttacagactgaagtagggtaggagagttacaagtcaggggttttttttttatctttgggtgataaatataggtgcccactacacatgcgagaggaaagattagatgagccattaaacacgcatggttggaactcattaaacgttccaggctagaaacataaatgtgggagtcataggagatagtatttaaagccatggccttgaatgagaccacctggttgggaagagcagtagaataaagtaaragagctgagaatcaagcgtgggccaccctgacatttcgaaggtggatatgggagaagggaaatcctttctaagcagacaaaggcaactacaagtgcacrgggcctakacatggaccgtgcttggagttcttgaagaatgtgacgagagcacagtgagcatgggagacactggaacaaaatgaggtcagagaggagtttagattttattccatgygtggtgggagggcatgsaatgaacatggaacaggagttataggttaagaatcggagttctgaagtcaagaaacctgagcttgtcaataaattctgctacttactgggccaggtcacctgtttgtgccttaatttcctcatctgtaataaaaggatgatattaataccacaaagggctgttgtgaaatgaaataatayatgcaatgtgcttggatcagcgctgagcacacataagtaagtgctcaataaatgtcagctctgattattattgaaggggagaatcatttgatctggtttatgttcttaaatgatgctggactgtagggagtcaagagtagaagcaaggggtccatttaggaggctgctgtcatcagggggcacatggttcttttttcaaaccccgaggagtctctcccctttccctgctgtttcctggatggcccatcactgtctcactgttctctgagctagtggagccagtcaggcccttactttgcacatagcctgtgcaatgtcctgtattattatttatgtcacatctctgtgactgagtcatgggcctgtcttgccactttttgtytttggaccctgccctcaggtccctaatcagagtgtgatggtgagcacttgtagctgtcacctccactgaagagaacagcagcrgtctgtctcagtaccctggaaataygtgcaagccacagcccatttcagaggaaattctagttgtagaaccccggagcagaaaagmtatgggactctggcctgagtgctgttagaaaccagccaggaggaaggcccattcccaaaggggagggcttccagcccatgctgccaggatgggcttctcagcaggaatacagttttcaggctcatttaactcctgtggacacatgtaaggagctgggcrggcaattcgaattcattttmgaggtgacagcrccaaactttggctgtgttagctcacagaaacattaatgggataatgtgctccatcatggagaatgagaatcaaaaaagrctttaatggggcttcattatctccatctgtccatccatcacttcttctccatcgctcaccacttgagaaatgagaacacccccaaactaattagrtttatcctaatctcctttctgtaccatccatcctctcagasgccatctgtgagtgtagagttcagacctttaagaattatgctaatcagtctttttctcatttaaagcgttcatctgatgaccacaatctgaaacttctggctgtgacaaaggggaaaccattctaagatttcctgctaatttcaaacaccctcatcctcacatacaggccacataagggccagtttctaagaaaagagctaaggatctttgagccaggtaacaagtttttttaaaagtgtgaggagaattttaattggtttataatatgagtgggagatgatttgcwttcatttataaaatcaaaaaggaaggtgcctgagctgttaaactcgggaatggattgtgtgtttgagtggtgcgaccactgatgtataaaatgcacrggagaaccaattcactgaggtaggcacctagaggaaaattacttacractagattttcagaccttctgcatctgccggagcctgtggcctggtcactacaggcgggtaaggaatgttaagcagatttctgtgcagagaggtcactccagcattgcagtggtttgaacctggtaggagaaagggcacttctgacacagcacattgccgttcattgcaaaccctaaacacccccaggacctgatcgggatgaatagaaatcatcagctctggaattagggggtccaaacacaaggctctgtggaatgattgatgctaaattaattgcttgttgaacaaataagcacatgagtcgaaactgggaattatagcccagagcagtgcttctcaaaccttaatgtgcctatgaatttcttggcgatcttgttaaaatagagtttttagttcagtcggtctgagatgaagcctaagctccggcatttttaacaagctcccaagtgatgctgatgtcgctggtctatagactacacttggtgtatcaagagaagttaagaatttgagtttggcaagcagatagaaccacattcaagtcctggccactttctggccgtggagccttaggaaaattacttccctcctctgcacttgattcatgcaacaaatatgtattgaatctcacgtgtgggctgtttaactgtgcttaaacagctggaacaagacagaaaatgatgccactctcctasgtctttaatttgatggggagacagacaggaaaaaaagwtaaagcaaaaatgtgtcattacaatttgtgataactgctagcagtaatattaatggtggctaacatttattgagaacctactatggatgaggcactatttaaggaagttcacatatatcaactcatttaatcttcataacaactctgttaggtatgtatgctcatcttctgttttcagatacaaacactgaggcacaggcaggtgaggtaacttgccgaacctcacacaccaaaaagtggtagagacgtgattttaagtcartcggtccagttctggaatgaacgttcttgactggggtctgcatactttctctaaaaagggccagatggtaaatattttaagctcttcrggctattcagtttctgtcgcaaatccttagctctgctgctgtagcccaaaagcagccaaagacagtaaatgagtgagtgtgactgtgttccaataaaagcccctttaccaaatcaggcacctggccagatttgacccagtggctgtcgtctgccaatgcctgttcttgatcattatccaaaccagcgcatctcacgctgtagggcagccctgtccaaaataaacataatgggaaccacacatgtgactatcagttttatagtagccatattaaaaaaasagataaaattaattgtaatattttatttaatccaaaatatcataaatattatttcagtaggtaattaacatgaaataattattaatgagatattttacagtctttttcacagtgtctcctaaatctggtatgtactttacacctgcaatacctctcagttcagacaagccgttttacargggcctggtagtcacatggggctgatggctaaggtcctgggcgaggcagctttaaagtattgaggawtcatttgggatggggccttatgttctgcttttctaacaagccgccaggtgatgttggtctgcagtccacaccygggacatcaagatgaagmctgcctccctgggaagaaaggaagaaagtgcaggaagatggcacaggagatgccaggcagtgtagggtgctccaggaaggcttcgtgaaaagagggaattaattacattggaaattgagacccagagggtgagaaggagctaactcagggaacagtgggaggaaaaaggtctaagcaggattttaaaaacattttcgattaagtgagtcaaagcatgcaaccacttaacattgagctcatgaggactcctagatttttgtgacaatacaaaggcagagaagatacgcagcttttyggaccctctagtgtctccctctccccatgctggattaggtacccsctttctgtgactcccacagttgcccatattttcctcatcacagcactttacaggccttttgcaggtgcctgcttattttccgggtcacccaccggggctgtgagctctgggcaggcagggcttgaagctttatcatggctctgytcccagcctgcttgtcagctagtgtgctttgactgtgtgagaatgaagacaggggccttacagaataagatttccactcaagatacaactgaattgtggaccccttgaaaaccttaaggtggaaactctcaaacaaaaaaattcagaggagggagatgagcattgtttgtttgaagtaggaaaaagaggacttgtggtacatatgagctttgtggtcacaggcaggtaagccacaagccggaaagcctacaaatgtgttcgttgtggcagtcaaagtaagtacatgtgaatgagctttgagagggggccctggccytacacttcctacatgaggctgctgcttttctccctcgatattcgctgaccaccacagggctgaatttggagttgtggatgcacaagctagttgcagttatatgtaacatcgagctcttctgggtggtctaaatctaaagccctgcaaaccccacacctccaaactccactaatgttcatagaaggctcacagggttcttttgccttctcgttaggataattttagacattttttgtggcattgcctctcctgaagaggcactatgcacagtggttacgagagctggccttggcaccagcctgcctgcatttgcatcccagccctgtgcctacctgggccagttccccgacctctctgtgctcagcttcctcatgtctgaaatggggatagtaacactgccaccctgataagatggtcatgaagattaatgaataaatgtaaagtgtttaaaacagtgtttgcacacagtcagtgttcactgttactgttctaaatggcttccacctgcattgctgcatatgttcctcccagcaatccttcagaaaaggtgaggcaaaccggggtgatttctgcctaatagcgtgggtgataaaagtgagattcaaggagatgaaacaacatgacccagagggagtgatagagctcaagtccaggtcttctaacttcaaattcacttaacattcactttatacttgctttatgtggggcctggaatgtagattagtgaatgyagatcaacgaagcacagcagagctccccctcagtggtggaggtgggtgtgctaacatggagatacaagccagtgactgtggagggggactgtcctggtcaaggttgtgcgagtgcatgttatgtgtttgttttagtgtgtcataaagttgctgggctccttggaggcagatgtatcctttgtgggctttaaagctgtgactcatggatccctgagggtgtacaaaccttctagaaatttcaagtaaagtgtatgcatttatgtgtgtgcacacatttttctagggaaaggagtcatacatagctttgntcagattctaaaaagtgctgacatgcctaaaaatgataagcactcccgttttagagcaacttagaggtaatttgtgaaatttttttatgaygagaagtctgtstcttgagtgtgagcttgtgcacgttccccacagacatagagacactactagtctgaagaaggaaagtaattcttcttaggacaacccttcctgctgttcttccatgtcagcatttccagtgatttgctgggccaaggagtagctgccctttagtaattatttaattgcttagaactttatttccccatctgcaaagtgggaggcgatagcttctacttcacaacactctayggggggtttcaccctcaaacataccccaaatgtaataggccctcaatgaacctgacctcccttctttatctggtgtcaagctttccgttggatctattccaggagatattcttggagaattgtcttttttaaaaattattatcatattcccatgcttttcctcctggataaaggttgtatcttttccccagaatgattctcatttcctgtctttggcctttatagagcaggttcattctctcttgttctccttccatctattatgacatcttgggaaagcccacctgttcttccttctgcaattcgattcattgagttgtgctctgttatttgttgtcttttgtaattggtaagtggtatttttggtccattattgtcttatgtgagaagagaacaaaataatcccgctaccctcaccctaagaaaatttaaattccatgttgttgccctccaaaactagagtgcaggtatttcaagcagtcattttacgtgttaaataaaagaggcgatgtgcaaatgtgaaaacaggcaccatctaagcttgacttttrccttagaagcattacagtgttcatagtgcttcatccacttctgggatttgttgtattgattctttcagcctcctgggcagaagcagagtggcacaggcatgggtgaggtcaagggttgascatgggagtccgaaaggcctgttgtggactccttccctgccacttgacagctgtgcagacctggacacatcacatagcttttctgagccttggcatctgtgaaacggggagtagtggtaaccagagtatatgtattagagggctagggctgccgtaatcaagtaccacaacctgggtgggtggcttaaacaatggaaatttgtcgytttacagttctggcaactacaagcccgaggtgaaggtgtcagcagagctgttcctcctgagggctctaagggagaatctgttcagtgtgtccacttcactgctgggagtttgctgatgatctttggcattccatggcttagagatccgtcaccccaatctttgccttcatcttcacttaatctctttgcgtgcatggcagctgctgggtccaaattttccctttgtataaggacaccagtcatattagattaaggctgaccctaatgcccttcttttaacctgattacctctacaaagaccctatttccaaaccaagttacattctgagacattgtggattagggcttcaacatatatttcaggaggatgcaattcaacctatagtaataactaattaccacatagggttgttaggacgattcgatgagatagtccacaaaaaagagctttttgcagtgcctggcacatggtaagccctaggtgaattgagccttattagtgtgggaacttatcatgccctcrttcaaccagaagctgacctttctcccttacaagtctgggcatttttctgtgttttgtttagttttgttttgcttttccttgtctctcatttttcatcaacccaaattgaaatggaaaaggcaatgcatagagcagttgaaacatggacaattctgtcatttgaccatcagaattccttctactgtcatttctcctcagtttgaatttatattagtaaaaacagatttgtgtgtgtaaaaatacacagaaacatactataacagttcaatccgtgtaaatcatttgagaagctgtcctaaatagcagaatgrgtttatctgaggggaaattttgaaaccaaagtaattatcagatggccatttttttcaaaaaaaaaaaaaaatcaaaactagtccagtattgagaaaacacgttattggaatcaaataagctggcagcaaagtctgccgttccgtgtgtactgctatggtatccgaaacataattatcaagtttaagttaattagactaatgctcagaaaatctggcctggcagcttgcggtaagtaattatatatactgattaaaaatgtaatacgtggtgagcagaggcaaaggcaactccattcgacacagcctgtgcacatacataattaagaagccatgtagaagagtgcacacaatgagaaggaactttgtagagactagcaggcgtccagccaagccttctacagggtgggatgcaggttcccaccttacccaatggagrgtgagcaggtgtcactgtggggccagcacagagagggcacgtgaccatgggttctcactgcttggcagatcacccaaaacacactccgagccacagcctggtgctccagcctgtcgtttctgtttcctctcaagtttccgcctcaaaagatgattagctgtgagacagccasaggtcagcttccttgttgatcttctatcctccgaaattatgaaattgacattaattatgggtcacaaatcagggtaggatgccaacctctgtgtgcaggcacagacataccttttatttgccyttctgctggcagagtggttttytttccagctttccttaaaagagggaaggatattgttatgtgggatccaggggcaaagacttgaggtactcaaggttaggctgtctaccctgattctttgtaagtaagtttattatgctgtaagagtttgattcagtaaatatagttacattttaagattggcgaaggccacagagaaatcttattttgttstggatctcttttacaatgtgtatstgttcctgcctcactagtatatcatatggtttacataacataattaaactcttatttgaggactgaggatgggtacaactatgtcatccttctgaatatctactgtgataagtttatctgggcaagaagtatttagtgagcctctcctatgtgcctagctttggttttataaggtcatggttaaggtattagattgaaccatatgacattgatgtctgggaagtcaaagaaaagattggctattgtgaaaagacatgattttgcccccaggaaacctatagagtggaagataaattagaaggcatgtacaataagtgtcctgaaatggaaccatcttggagggccacctaagtccagtgctggtggatcaggggaagaaatgccatccatgcagggagaacagtatgtgcaaagggctggtagtgagatacaaggcagttgtttaaagaataactcctactcacatgagatggaaacaggacaaagggttgagagatgcaggtaaaatggtaaaggcctgctactgtgccaagaaaacyatgtccaggaccagtaagtcaggaccagagcatttgatgtcaaaggattaggagatggagtcgaaattgcactggaccattacctagaatttctgctttttaaataagagaacccacgatataagctctgtcagttgtgatgttccaattcagagactakatgcaggccacccctgttatatttagttgagggacctttttagtagagcaacactgaggcttttagtccaacatggcagaagactcaagcaattcactgaatctccctgggcctttgttcccttctctataaaatggggataataatattgtgcctctacctaccctakagttcatcaaataacattctgtatgcaaaagagctttaagttaagttagagcctcaatttagtctgtattgcttagcaaatgctatgtattgttatatgaggagggggaatagacagaaagggagtgggaccctggagtcccaactgcctactagctatgagatcacatctctaagccttaacttcttcatctaaaaatggaaatgacagcaccatggatggggtaggtactcttatgaagagtaaatgagatcatgtttgtacttggcactgagcacattgccaggcagacagcaagcactcaatagagctccattaaaaataacaataacaacaacataattattccatccttaatgttgggctccagtcctttgatgtttccactttccgggagcaaaaatttccccaacattggaccgagggcatctctccttcagccaggaacaccactccatttttctttttgagaccaagtctcactctgttgcccaggctagagtgcaatgatacaatctcggctcactgcaacattcacctcccgggttcaagcaattctcctgcctcagcctcccgaataactgggattacaggtgtccaccaccccacctggctaatttttgcatttttagtagagatagggtgtcaccatgttggccaggctggtctcgaactcctgacctcaggtgatccacctgcctcagcctccgaaagtgctgggattacaggcstgagccaccgcgcccggcccagctctccatttttcatagagtagtatttgttccttgtggtttatctgcattttggctgaaggatcgagtccagaatctgaccccctcctgttgtaagtagatgagttttctctccacccaaggcccaaatarccatttgcaatgtgaaagaacagttaatcggggttgttttgcatctgggatgccagaaaatcacttttttcttgatttaaaagaaatttaattttggcatctggtagacacagtctgataaccaattaggaactctcacagattttgaagcaataaattggctactaggctttactctaatgtcaatgaactggggtgagttattgccaaaatcaatcaaaaagagagaaaggagcaaaattgcttggaaattagtttacttctttcaacgtcttgtctgtgtttcctacccaaatagcaatcagtgtgctgtttcattccccaatgataggcagaagaaatggagacagagctgcaaagccttccaaacagccttcttggtgtgggaatcaacataaacaaaaggactaaagagattatgaaatgtggaaagcatgcgaaatgtatattactactgcggacatgtttattaaaatctgggcaagcattttgctgtgaaaataaaacataagagcacatttatggagaggagaacatttggatgactatctcacagacataaagctcttaaggcagagaagttttaattaagaacagcaacctgtgtgaagtgctatacccaaaatagatcctagtcgggattcagtgaagggatacatcagtttcagacatctggaatccagttaataactccagtacttttatatggcaaatgctactatgttgcaactttggtggacattttggaatgggagctggattcctatcttgaggaaaactgcggtcatccgatgttgtaatcttacatgcctctcaaggatgatcatttctstttgttttccatcatagcctccttttctttagttgtgtaagtagttatgtttaatgatgttaatgagtatctgcaaacccattgcccagaacaaaacctatgattttgctactatcccacatctaacagtatgatagtcccacacaaaaaaccatccccttgtctcctcacatggagtcagtccagcatcctcaatctatgctcaccattgctttgtgacttttcatatagttttaggcatctctatggattcctaaagtgtgtatwtttktattgtctttagggaatttttttaaactaatatattgttaagatttctccctatgagctgtgtgtcactatcaaacatttgttttgcttgagccatggtatttaattatgtgaacatatcagggtttattcatctactccctggtgggatgttggtcattactagattctatctattttaatcagagtttctttgaacattctcatgcatgtcttcttgtacacatatgagaatttctcttggtaatatacctggcagtcatattgttgtagatgtcaactttaggaggtaatgctaaactgttttcaaaagaggttattccagtatatcttctcaaccgcaatgccagagcaatcctgggagtccatatcctctttagcccacagaatggtttctcagcacagcttgtcaatgaaggatcagactgtctgagtaataagtccaagttctaactcttgatcaagttaatgtaaaaatatcactttcaaacattggtaattttgatctccacctaaatctagcagtactgcagtaagatcctctttcctagagcattgaagccttgaaagcaatatggccaaagggatacaaatgtcacatggatgtttgggctagaaagttttaaagatctgtgtcaatccctgattctaggarcagtccattttcaaatatttgtgtctggacctttacatagatacctgaaattataattagttatttcaaagcatttttatcgttgtcctttaaaaaccaatcagtgaaactcctttaaacccttgagtggcactgaggtgagattaactgaaagattaggacccttaagtgatttttataggtttttcattcatgaagttataactctctataatatttcagctttgtgtatctctcagccatggctgtttctccagtacrtcttaagcatctcagccataaataattggaaggttaggtacatagtaggcagctgagaaaggtgagggtattgctttcctagcctgaggcttcaaaatagtcccaagcctggcattgcattttaatttttcactgtgccaaagctgtgtgtgtgtgtgtgtgtgtttgcagttgccttacatctctgttgcctatgctgacttctggagaatggtcaattatagggcatataaaatgaacagttgaactcataacaaggaaatctcagtttctttcaagtattctggttagaaaaaaaaagcatttgaaatcctctgtgacgatctgctgtcatgcatggtaagcatagcgtttcagmtgcattcaaggctttatgtcttcattaaagagggtttttaaatgaaatagagagaggcatttgggaaaggttggctccaatttgtttgtgcaactcacatgggccaggttctttgaagggcgttggaatagctccatcagaacttaatggatttgtaggctgcacagggyatgtaacttccaacgggtgagtagcagcttcagagggtgcagttttgtaatcagaagcagaatgatcctattgtagaaagaaggaatcgtgaccaatccagtggactggtgagtaccgttggaatatagattttcatattagtcatttttcatctgccagcatatgagatccagtgcmaagcacctggctagatggtgctgggatagctcttttagctctgccaaacatatggtatgcattcagaaagaagtctgtgaggtcagcctgcatccttgctgctccatggtagtcaccacatgtgcaaatagcttgctgctcacctgcttttctggggaaagttcattataggcagggctgatgttagggtgtgtgagagacccagtaagcaaacattgagccccaaagtgtcattgcccatgttcagaggcagtgctgggtccagctgttctgggacggcctttctaccttcagctcactgagtttggatttattacagctttgcctgtttaatagtcttctgcrcctagcacaaagtagrtgcttgaaaagagtgatgtgactgaaagaatcattcagtctctcgtcttctagccctttcgcctccagtgctaaagggaagrgagattttcccacttctccacctcatcttctaccttctatctgagaacttcctcactcgccttcagacacttgccttcagccagtgcacagaccatacagatgcctccttcttcccttggggtgtttkcacttgccactcctcagctgactgtcctttcctcagagcagtcttttctgaccatattgtctcaggtagctccctcttttattccctcccaaggcagtgatagatgattacttgctaactgcctgccttctctcctagaatgtaagcctcccaaaggcactaccttgtccagcttgattactattacactataaaatacactgaawacatgttcatatttgttgaataattgaatgaattctgcagagaaacaagctttaaatgcttggggatctggattgttcaaaggtcccagctagatcagcttcttcaaataggttttatcttgacaacccagttgctgctgcctgcaatgttgtgttgagaaggattctgtggctgtgcattattggttgcgtgctgtgtgcttgcctccctctcttagttgtgtgtttgcgtagcatcttgtagtgcagatttttctttctccttggagagtttccttgcctacactgtgcttccgaagactctgcaaggtacctttgaaaaaagaagccatatgtagcagaagcaaataggaaatgaaatgttcaggagattccaacaaaggcagaaattggccctatgcctcttcccattccttgttctgagtactgtgggttgacatcactctaggattaaaggagaacagtcttgcttaaacaccaatatctgaaacaccggcgggggggaaaaaggcttacagaacatgactggccaaggaaattgctttttgaataaatgcttccttctccgaagtctgcttcatcacaaacctccttttcagaaggagtttcatttcatttctcagtgagcatgtttttagaaacagaggcctgaggaaatcaaactggcagagatctctagtcccttttgcctcaccagttttctacccactgaaaaaccagaagggttcagatatgatggcgcctggggtgaggtgttggtgrtcagcgattaattcctgaaaactgccctgagatgcaattttcccctcagaagaggttttccagcagggccctccgggcttagaggttgatccctatttgcagtgttagttttgctttctatgctgttttaccacccatgttttcaactatgttaactgaaagaacgttcccaggaatttatagagtggatcagaagagcactagacatacagcaaatttgtttggatgagacatacagtttgctgcatgtctggatccactagtggatccagtgtttgtrtgtctcatccaaacaaataccactctgagttatccatgttacattggttgagtgatttaagttccttgttttatgtggaaaatggggatgatgagctagcatagccagtatattgggaggaaaagtgtaatttagtgacgtatttgaccaatgcttattgaaaacctactacagtagtcccctcttatctccagtttcacttttcacagtttaccatagtctgaaactactaaatgaaaaattctagaaataaacaattcataagttttcattgtacaacgttctgagcagtgtgacaaaattgcacgccgtcccactctgtcctgsccaggatgcggatcctccctttgtccagtgtagccatgttgtctacactacccgcctgttagtcactgagtagccatctctgttaccaggttgactgtcatgaaatcacagtgcttatgcccaagtaacccttcattttccttaataacagccccaaagcataagagtagtgatgctggcaattcagatatgccaaaaagaggacataaggtatttaagagaaaaggtgaaagttcctgacttaataaggaaataaaacaaattatatgatgaaattgctggtagggcgcggtggctcacacctacaatcccagaactttgggaggccgaggcgggcaggtcatgaggtcaggagttcgagaccagcctggccaacatggtgaaaccccatctctacaaaaactagccargtgtggtggtgcactcccgtagtcccagctactgagaagggtgaggcaggagaatcacttgtacccaggagacagaggttgcagtgagccgagatcatgccactgcactccagcctgggcaacagagcaagactccatctcgaaaaaaaaaaaataaaataaattgctaagatcctctgcaagcagggatcttctgtttgtgcaattgtgaacagtgcattgttacaattgttctattttattcttggttgttaatctcttaacctgtacctgtacctgatttatacattcaactttatcataggtttgtgtatgtgtagaagaaaacagagagcatacatagggttcagtactatccctggtttcaggcatccactgggtgaagaagggggattcctatactggtatcagatacagctagccgagaggatacgaagatggatgttactctgactgggcaatgtggggactagacaggaagattttgtttttaccaagtttgatattgtttagggcttactattacttgaaaagcaaagaactactgggcgagtgcaaattatttctctactgaaccctgggagtcaggctcttgccacagtgggattttcgtctgacatatcagacccaactgttgggcaagatcgttccaatcccttacaaggttgagaagaaaatcatagcaatggggtgtcctaagaatatcaaccccttagtagctcctcacagcccagttccaggctcctgttcttcagctgtcctgatgttgtgttgtaagaaagttytaggccgagcacagtggtgcatgcctataaccccggcactttaggaggcggaagtggctggatcacytaagcctgggaggttgaggctgcagtgagctggccactacactccagacagagtgagaccttgtctcgaaaaaaaaaaaaattacctctaaatggtggccaatcaatcagggagcagtgttgcagatccaggaggcagtgtctggggttgtttttctcagatacacatttgaggatagaattactgatggtctccctgacaggaagtgactacctttgatattttaattgaaatcaactctgctcagaacctggagctgcagttgctctttgctgagatgctcctaacaggctttcaatggaaaactgtgaactttcatgtctaatcaattccagtgattttttttttttttttgatggcatgggcgtactccaacaaacctgaaatgcccaccttggttcgtggaggtttatatagggtacatagcatgttccaaagactattcatagtgtagttagtggagtaatatctggtccaaattatgatgctagcaaagtctcatttgccgctttggcaatcggcttgacaatgtgatacttcaatgtataattggataagcaattgggktctgttatagtacagtggtttggcataattattttccagcactgtgattttctagttaatacttacttttgggggttacaaattcttaaacatccaacactctataccccttgaaaatgggatgccactaattaatataagagcttatttcagcattttggccccacaggcagcactaaaaatacttgcttttactcaagtaagttatgcttaagtcaaagctttggcaactaatcaaatgattaatgctccattgattacttgaatttctgttcagaaaaggaggaggaactgggcttttgaactttcacagtaagtagaaggacctgaaggtaatttgtttgcacatagatatctcacagtctagtgcttagtccaaggtccagttcacaggatagagaagggaagcaatgaacatatttttmtactaagtaatattcaaagaacttcagcgttctaaggtatcacaagtggcaggcagaggtttrtggtccaagaccattttctgcctcaagtgaaagcacctggtgattcattgggccmccaagaaagtccagcgtgggcgccagtctgctcagtaaccagcacatakacaaaggaagctccatgtctggcaggaaacatgtactgaaaggacagtgccagggaggtgccagaagcatgaaascatccagaatcgtgaaatatgactcaatcagaatggtccaggaaggcttctcgggaactttgagaagtgaatgatagaagagaggcagaatggatattgggcaaaaactgagtgattttcacactagttcagagcaatcttggcagggaagccaggatctctgtgtgctttacagacaagcaccagggagaaagctgccagatgacaaggtccatctatagtgaggggccaagtcctctcacttagtggccatgacgctaactagcctatggggcaaatgagccccctctcccaaactttctcttctgattgttgccatcactttctccctttaattcattatccttccaggacattctttatgagcaattattctagtccttttacttccttgcctatcttctcatcacaccaaaaataaaatccaaacttctcagccctgcccacagggtgcaaatgatctgccatccccccaagtcctctctctcactcttccagcctgttacccaaccaccacacttccttgaaggtctgcacttgctgttctttctgcttgaaatattccttcctgcccctttacttaaatactcattattcacacctcaacttatatgctacatcttcagtgaagccttcctttaaaagcctgccctacccaaagttctaccatcccccataccattttttgacggagttcttataacatgaaattattttgactcccatgcatccatgaaaaatgwagctttctagaactcagcccagtagaaactgccacccacaagcattaaaggccaatgcatcaccctcacatcttgagtcaccctttcccacctcagttgtacttccttccccaggggccatttctcaagctgttaatgccatattttcacaccatttcatttcatatatttttaaaattgattcttttatgtttaacttaaatttactttaaaaggagacttgacatgatttgtcataaatgagagatgtccctaaaaataaatatgatctaaacaaaacaatcttattatattctagccagtctggatggctcttctctttctcttagaggtgttgttgatgccttatcaaggacgtactagtccgctgagactttattcttgaacagtcagagggactgaaagatcactgaaaagggaataagtttctctcagtaagattcaaagctgtttgcagctttgcatttgtagggccggagaccatcttttagacccctgttgtgcgtgcctattccatctttaaacaatggaatgttaaggcttctcaaagtggcaaatttcagctctcttgctaactctgatacatgtttgttagtagctgcctagaagccaggtcaggattcatcagggaacagtgctgtaattagttggtgaagctgaccatgsgtacaagttgccttgctggggaactggtactcgcatcatgtgtttaacgaagctgttcccattgcccagaattaccctttcttcaaaatctcattaccatcttttaagcccagtccaagtccttgatttttaaaagtcartctcagacctgaattccagcaagaattattttgtctccccctgccccagatactccaagaacactttgatggaacttctagttcggtagttaggccagtattaaattatctatgcatgaatctgtctgccttattgcatggtgaacctgaggaggcaaagatcttgggcttatttatctttgtatcatctttcataagacctagaacagagcctggaatatatcatgtgttcatcaaaacttggttgaatagaaagtaataasagaggatcagatctaaaaaaacaatacagttattttccttttgagactttatataaacccctgtgtaaacagaaccgtcaacccataagaaatggtttatttaagctctctgcttctgtatgttgttttataaaagtgataataatgaaatatgtttttataaaaacatccaagtttatattcagccgtttgcttctgtaagaagagcattaaagtagttttcccccgtttgaagacaatttggcattttactccaggttcgttccaaattctgaaaaacatttaaattattgtgaaccattcctcctactgcattccattacagaactctaaagatgtcaatagcaaaggcggtttgagcaatacagcagggaattcatcattaccccatataccttgtgataacacactcagtgcacaggagggagcacagtgtcaaaatcgacacgtatcagttcttcagtcagaaatcctgttaacactaccttccccaaaaaccatttctagcagataaagtgggatgactgaagatagattttttgttttaaatctcttttcaaagctgtgcagaaatagaatttgcttggagaggccatcacagacttcagtctgttgaatgtgaataaagactttggttcaagtttttgcaaacgttgtcactttggcgtgcactttcctctaaagaacaaagcttctgtgaaaaccgttttgactattgttgttgcatcagaaggaaaccagtatgtaatacatcagcgttggtgttgagcattttcagagcaagcagagtcacatttaacttacgtgacttacctgcagaaaggagagatggagaaatatagtgcactgaatcccagacacagtcagttggaagtgctgttattttatgtactactaagaaagaaaaacactgccaattaaactatgacacacttttggttataggacatgttttgatttcaaagatgttaaaatatgaaaaaatgtgcaccttagaactggtgaactaaggaattaaaatagtgcaggttgatttacactgcattccgtgcaataagaccatgcaataataataagccctggagtgcacaaaatgatggccttgaattttatcttcctgcacatgatcccctctgttttttccaggattcacagccaggcaactttgggaacaacctagttaccaaatgcaagccaagttcttcctgtgacacctttttaaggggtctgctatgttgagttgtcaaataaaatacaagaatcccagttaactttgtatttcaggtaaacaacaaatcattgtttcatatmaggatgtcgtctcaatactgtatgagacatccttatcctaaaacaagtcactgagtgtcttgtatttttgtttgctaaatctggcaaccatactcctggggtattgactacctttgacctccaccacattcttttaccataggaccttagcttttaccaygagaagcctcgattaataccttactcactccttaggacagctctgaggattagggattagtgagggtcaytttagagctgaaggaggtacatttcctccccagatttgagtgtctcattataataagttgttttggatctgaattctgatcataacttttaatccttctacaaagtagttagttaggtccaaaagatacagatcactggggaaccatggagatgaaaawtacttttactcctagaaacaacctctgtggartttttagtgctcrctgtcattaggtcagtgttatttagcctaaaaataatgctaatgactgacagtagtagcagcagcagggaatattaaataccacttaactrtgtgtcaggcacggcactgctcaccactctttttcctactcccattttasaaaggggaaaactgagacacaaagagattaaaggaacttttgttcttctcattgttcaagctcagacctaactaactctcgccttcttggagagccatttttggatgatccgtagataacctctttccctccatcactgtttttcataacgtttctttgtgaaaccaaggtgatactcaaaagcctttgcaakgaggctagctctatccagcagccttcccattttgtaatcccatctcactaagaatcagccgtttgstgtgtaacctccctacctgggtgccccaggagaacaataaaggagtctgtctggttcagtgttccagtgctagktctggcccctggcattacagagacagagcaactgtcttgtgtgttaacaagtagtcaccgccctcccctgtgggcagccaaagtaatctagaaggcttatcagaagtgaaactcctccattaaagttcacccacggcaaatactgccttttggataaactactatttaagatcattagggctttctctccgttagccaggcaagaagttgcagccaccaggttcttgggttgctttagggaaatggaactttactccaaactgtagcatttttagtcttcaagtcacctggatggatcttctaggacacaagtcttgcccaccagggcctttcccaggctccctatttctgcagagattaaaaacattcaaaggctgctgaactgcatccgcatgttagtgttgctaagacaagccttgtrggccagacatcccatggacagagcataaacagaagaaaagcagttctagggcaaggtttgcaaaggacagcagtagtactgttgataggatcacaagcaatgtgcttaaaggcaagcggattctttctatatgtgtgtgggctctatctacacacttctcccaaaaagcagtgattctcaacagtaagtgcaccttagaattggctgagaagttttgttttaaatccccaaacccaggctgccccagaccaattaaatcagaatccctggggtgggttttattttttaaagcttcctagatgattacagtgggcaaccaaccagggttgagtgccgctgttctaaacagaaccacatgcttccatctggggcttttaggagggaaatctcataacttttaaaagctaggtacaacagagtttttgcaaagatgattagtttttgttttatttatttcctattatttcccaaaaacttcttctaaggattggcacaatgttgccatctgtaaggcatatgacaataacagacggtygcctaataaccaggaaggcattaacattcacaggctctaaattatttggattcctctggtatgatctgtgttgttgaggccacttaatgctttatttctgtgtcttccaatggcagtagcagaagtgggaaggccatatttcctgggctttgcatatctctttgtcatcctattgaattgttataagataagatggatttataacagacgtcaaggtagtatcaaaatgaaaattagttcttgagtagaagaatagcaatcccgtttgccttgcctgtagcaactgcagcatgtttgcctctgcaagaaaggaaatgacttcttaatgtggttttctttcactaaggagaattaaatctacatggcaaaatgtaaaatcagcgtgctggcagccaaattctgaagggaagatccatgaccctcataaatgtatctgtggcccggttatatgctaatgagcctcatttaggctcaaacttacttaccaggagtggaaatayagctcagcgggagtgcgaggctatggttccctcactgttttgccttctgtatcaatgttgagctgcaataaatggggaaatttctccatctgctgcaagctgccagggtagaggcctctaggttagayttagagtytggggcctgagatagcaaaagtcatttmttagttgatagactttttgctgagttggcaaaattatttttaaaggatcaacttttaaaaagtcgatattttaatcgttaagttgacctttttcaaaatggagtggaacagtatctgtgggatgstctttmgggacactgtagatccctcaggatgaataaaaaggcaaaagttgttggggataatactggcacctaccccactacctagctgggtgatctttggaccggggtatgaacttcctcagaactcagtttcctccacagtaacatggggttaagtagcgtcagttttatgagttattgtaaggattaaacgaaataatgtatatcaaagaaataatgtgcgcctttcacatcataaatgctagctatcattggtgctattaaattgtctcaatcccaaatgacttttaacacataacacaaaatactacactgtgcattcccatgaagaatgaacggataacctgcggcattttacaatgtatagagccacacacaggaacaataaatttagttaatgaaattgaatcataataggaggttaagggagaaaattgagcatttctaaggaagagagttctgagaacatcctctctgatagaattgaaattgtattcactctatatgtaaatctgagacatacacacaattttttaaatatgcctgtaatctgaggaggaatttaaatgattcaagtgttaattttgagacaaattgttaattttttgtaagttgttttctcatttaatctcttttttactgtttccctgcttgaaccctcttttaatggaaatacttattacttactcagttctcatggcccttgtgtcattatcataaatttggttcactgaacaaaactgctcagagctcatgcaagagagtctaaaccaaagagagtaggaggtaaaccacaggccaccttgaaggaggggattatgggttggtggcaaactcaatgccttcaaaatccaggaagtaaaataaatgaatgatgcctrttaaacataagaaaattagaagagtgtgggggagattctgggaatggcaaatgctccccattcccccacttcatcccaatctgtgatcacctgtattagtccattcttacagtgctataaggaactacccggggctgggtaatttataaggaacagcagtttaattggctcctggtttctcaggctgtacagaaagcatggttggggaggcctcaggaayctttcaatcatggcggaagggaaagcaggcacgtcttctgtggctggagcaggaggaagagagagtggagggaggtgctacacacttttaaacaataaggtcccccaataactcactatcatgagaacagcaccaatggggaattctgccttgatggtccagtcacttgccaccaggccccacctctgacactggggattctaatttgacatgagatatgggcaaggacacagacctatatcatatcatcacccccctcagcctcagtagatgattacaagatggcaaatgatctgattattttaaatgtggattcttgtataaagcctatttgcaagttgtagcaactgaaacaattaaaagatacacctactggcctctaatttgcaaattttgttcagtctcccccagccccccgaaatttgttcaaggagatcccaagggcccatgaaagagcctcttccwttttttttctccaaagctccagaaacatgacaaggaggactttcctgcctcttggagatcagaggaggaaatggcagcagaagccgcagctctgcgggtctactttcagtgacrcaggtaaagactgcatttcgtcattacccagaccctcccgtgggcctcaggaaagaggctgcactctcagaatggggatgcacaaaaacaccttcaccagcatccttgggtggtggctgcaaaggacaaagagctggaggggagaaaaccctggcccttgagtactgtattcccagcctcccagtctcttccaactctcctgcctcttcactctcttcttccaagccagtgcccccagcccaccaccacctttctccagtctttcctgcggtggtgctcctccagaatccaatgttcacaaagcagaccttctgtcatgcacaacttcttgtttaaaaggtcaaccccaacttaasttaarggtgtgacatggcccttaggctcaagtctgtctgcaaagccctgtaaaccagctttctctgcctccctaacacgcccccgggcaaactcctstgctttcrctgagtggactcttctcttcagttgctatttggtaaattgcccttcatgtttccctttatgttcggctcctaggaagctcaggccacagggaaaagtcaaggcttgatagaattaatctttgtcttaatgatgactaactgttgagagatcataggtttaagactcntggtagaaagatagctatagccaatttccttgtcaaaatgcttctactccaaatttttatgcagtgtctaasgagctcatgcctagatctatctggcaatctatattatccctcctagtctcagttcacatagtagactgctggaatgactgagggtgatgtttggcctgtaaacaaaaagtgttaaagaaggccaggtacagtggctcatgcctataatcccamctacttgggaagctgaggcaggagaactgcttgaacctgggaggcagaggttgcagtgagctgagatcatgccactgcattccagcctgggtgacagagcaagactcagtttcaaaaaaacaggagagagagagagaaatgtatctatctctctgaaatttgtttataaatatagggttaccatgcaatactggcatatatctagactaaaaaaattacttgtttatctgaaattcaaatttaactggtatcttgtatttttttctggcaaacctgttaataaactcccatggaccccagttacagatcctctcctataaatagtttctttttygtttttagaattagataattccaaattaaaattaggcaattcttcatctgacctgtgaataaatatgttcatgttataagttgcagaagtagatcagacacaaataaaaaacaaaattagtgaataaatgctgttagcaattgattggaaaaaattgtatcaaccacttagtgatcakgatttttagctagaaaacacattcattgtattctgatttcaccttgaaatgtaagtaagtctttactggrtagctttaaatatatgtgcacttggcctttctctccccagccctctttttagagtattctaaatagttaaagacccagactaccttgccccctattgttgttcaaatatggtgttgtactcagatccttgcattctagaaagcttatttcattctcccatgtcataagtttgtcagctctgcactcagttgcctggggggatatggcaagtgctrtaacagaggctgtctttcatattttattttgaaccttttccactgttcaccatctctctctcgttttttaaggatcaagctagtttagtttacctaagaacataggcctatgggcatgactacaaacctctttctgttcctcttatgaaggccagtatgtcattttagagtgccctgttcaaatttaaatgkggtgacaatacctcagacttgactgcctaggttgaattttttctcctgggttttctatgcagtgggtattttcaggtagaggctagaaagctttagcctttttcccaaggcttgctgaattgtaggagttttgtcttagaaygctttttctagacactttaagaactttaagaagattcaaacttattacccaaatttcctgtaggctttgttttgtcagtttttgcttctgtcttgcctggaggcctgacacctcctgtcttccaggtaaattgacttcccttgtacatcttaccagaaagatatttaccctaacttgttacacaaactattgccacagtacctgtggatttttaagttaactaacatgtgtatttctctttaaaggttttgtgcacagaccaaacaaatcaccctcagtcttcccagcagtcagatgtggtaactaagactaggacggataatataggttgtgaggtggcaaacaacttagggtcctaagattttgccaagactgtcatcattacctggagtataatgggactaactatacctccctttaaggacaatggaaacattctattgaaaccatcctcacagggttaacaagaattagatgctgggttctgrwcagaaatatagttgtaattaagcattaatcaggctgcactttggcccacttcttcgtaaccaaaagtcccagagcaccagatgctaaccatttgcctcctcattgttcctacagagaagatttctgatgttagaatcataaggcctttgtttgtttaaaaatggcttaagatgtttttcagatcctgaattccagcaaaagagctattgccaaccagtttgaagaccgcccccccgcctctccccaagaggaactgaatcagcatgaaaatgcagtttyttcatctcaccatcctgtattcttcaaccagtgatcccccacctcggtcactccaactcccttaaaatacctagacctaaacggctcagacaggcagatttgaggtttccccctgtctccttattcggcagccttatgattaaacttccttctctgctgcaaccctgtgtctcggtgtattgacttgccatgaattaggcaacaaacctattacagttacagttacttttttaaaggaaattcaatcgttggattggtccacctgcttatttcttcccttttcaaaaaaaatgtctacatattgaatttttatacattaagtggttcatgaaacccctgaaatgtgttagtaaatagggcaattatgaaatatttggacatagctagactttaaaaattgttaatctgaaggtcagatagacttggccttctccagctttcgtgattattccctcagcagcaagctagtcttaggcagagcaagtttaaagacattcatggtgctcactctgcaaaactgcacaattctcaacatgcacagaggcagacatgatagggctcagccctggaattgataacactagccaacacacttgctaagaatttataagatgtagaccctgttattatcctgtcttgcaagtgatgagaaaactaaggcttaaggatgttaagtattattagttcaaggccaacggtaagtggcaaagctcagatttgaatccaggcagtcccaccctaaaggccattctcttagtctgtgtactgccctccttgctaaaagagctcacctctctagccacttccttctccctgtcccatctccccttgtaccctccaaatagtcttcttagcctcttcaccttatctactggcctatttctgccttgaggacctcccacctcctcgcctgctggacttcttccttacctgccttgttaatacaaccctgcccagcacctgcctccctggtcacactacagccaggtagcagaaaccaaaatgggcctggatttccccaaccaacttggttctacttgcaagattctcagatcatgctgaatcctgcctaggctaccctcccactttcttttctttaccatctgaccacatgcctaaataaacatcacttgggcgaatacagtgttccccaaattgcattcattcccattttgtcatgatttttcttatctttgtggaccacctagagcattatttacttgattcactttttgaattttagtatatatatcttaaactttatatttcagcctcaaagaaaaacaagtactacctgtaattagaagttaagcataaaaataaacataagagaaaaacaatgctgatgatttccagctctgcatagttgcttgccttagcaactaggagtgagattcagtctctgtgttaaaaagtgaggctagccaccattagaggggcatttaattctagcaccaaaccgaaactctccatttggcatattcagaaggattaaagagaataacctactgagagattcaatgtagatcacttaagattatcttaaacaggaatatgactgactcccaactttggagaaacagcagtggaggccagatcttaaacccagagcaagctggctttagacttgcttcaaccctaaaccagtactcctttccacccacccacctccccccaacccctgcaggcatatcaagaagacaaggtgcatgggggaaaaccaaagagtcagcttccctagggctgatgggtcaaatctcagtgcttgcctctgacattttgcttgccgacagtctgtcttgaaaaccaacaggttgcaaagaagaatgtgaacacctatatccagagatgccctatataagaataaagactataagaccaaaaagatgttcttgacttaatgtttggggtggacatacctagttatacgatttggctgtttccccacccacatctcatcttgaattgtagctcccataatccccacatgtcatgggagggacccagtgggaggtaactgaatcaagggggagggtctttcccatgctgttctcatgattgatagtgatggttttataaaggacatttcccctgaatacgctgtcttgcctgctgccatgtaagatgtggctttgctcctcttttgccttcctccatgattgcgagtccattaaacctcattcctttataaattacccagtcttgagtgtgtggttattagcagcatgagaacaaactaatacacctagcaactccttggtaagtattatttctatatcttccttacatataaagaattaatcctcagcatagcaagagtaccattaggacaacaaaggtaaacattctgaaactatgtactgactcctcagcctcttgaagccatcaagacaccaacatcagattaattgtgtaaaagaactctctttatcttcccatataaccctccagggttatatgcacctgcattttggtgttttagcttctctctgtatcctttgcctaccagaaaatgactttgaattgcagtttcttgagcagtagtgagaaagggttattgccttcaccatgcacaaggagctcaacagcccaagggttgctgaatgaagctgcagttgtctcactcaccatgtgacagatccttgatgaggctggcaatcctttcgttccaggaattcagcgtctgctctctgcataggtgaatttatgcatttgctccctacacactggactgagttccgggacaagggatttgcaatggctcttttagtctatgttctaaatcacattagatgacaggagacctgcatttcttatctaatgttgccttcttcctggaggatggtaattctttatgcaggtattgatacttggatttgctgccactatacacccaagcagtttttctacttaattttaaagcaatggcatgtgtcctagtgactaggggggaagattttgccatctccccatcctcccctctcccattccacattagaattgagggggatatgttgttaaaatatgcaagcatcacccctaattctgatggaaagtcagagcagggcaggtttccacaccctgttgtgtcagcagagctcacttgtaattcatcaagctcttctctgtgcacgtcgttattttatagataattggttgcctctcatttactcataatgggaccatgcaatttcaaagcaactgagtcagcccaatacagcattattagtagttatagatgtactgtcaaggcaaaatttcaacactggcgtttttgaaaaatcaccataatttctgccactggatcacccttatatcataattgtggatagtcaaggtgattgagaaaggacaggtttgcctatttagcacatgttctggtctgtaaattgtaccttttgaaatctaccccaaatctcaaccacctcagagatgttccactgtcagcacagaagcctctaatgagaaaggcccaggaagctgatcatagtactctcatattttcttgggggaaaggtggattttaaattcagcttcatcaccaatttaatcttaaacccactagataaaccccatgtgaggagctcagtaccaatgtaaatgtttcagccatccccaagtttcagaacaattatgaaactctttcagccgttcccagattgttatgaaaatagattttctttaggctacaggtacaagagaagatacttcttttaaggctaaagatatcttagtgtgttcaaaaagctctttgcctgacaaaggacccattgttttaaaagaagccagaagggagatttcagttgtttttttttccccttcttctccagtccaatttctgttggatctggctgcctctcctctcattctatttagatgattacatttctagaatctggttttagtgacaggaaattaaatactctattacctggattagataaatataaaccaactccctgtgcctaaattgggaataataaaccacagagtcatggaaactttataaaccatcaaatcaaatgtctcaaatgatttatgttccagcaactcaaaagagggaccatccaacaacactttaaaaacctccttttagaaacattctatgagacagtctaccccatggatccaaaatggatttttggcttagtttagttatttttaaaatgttttaacaagaccctactttctccaacatgtacccagttgttcaaaagatttcctacaggccattgatggctcaagaatctgcagaactcttcctttgagatttacttctactggtaattgaaaaatgactagtgtcctgaagtaattttaacgcatgtgaatcttgaaaccacatgattcattaccacagagtccttttcagaaaagtataatctaaatagccaaagataattttttaagagtttcaggctttacttacttacatcttgcaaaatggtaataccatcaaattgtaatacaataaaataaagcttgtcattgtcaccctcatcatttttatcctcatctccagcaatggataactgcatattaatctgcatactcttatatagcaaaaactttctaaatctttcttctcctaagacatttcttttctttttgtacttgcttctctccactctccatagtgtgctcctttcagtgttgcctttttgtctgtctctgcctgaaaggagggtgagaatgaagactcttctagacagtgtggaaggttaatatgaagaaaggctatgaaaattcacatttataacctttgaccccactgcttcataatagctaatatttatgcaattcatttggtcctgtgcctaaaatgtccctcagccacttcttacataataaatgctccattattttgacacgctggggcatcaatcaagtattatgtacatacttaaccgggatcatcaatacagggtacactagcaaagtcagctctagattgtgctccttctggctttaatacttctctgattatctaagaagcagttcagtgtactctaccacctcaaattcatcatgagtggtgggcaattgagactgtgagtgtcttatgtattaaactaaagtcctcccaacaatgaggaaaagagaggatagagctaagtagggaacatcttgttaattaaaatgtcaccacttgtcccagtggtgtaagtggggtaaaattacaccccagactaaatgtatgtgtgtgccacttcttcttcctccagaaacctgtttttccttcttttcgcctacacagataattgaggcagaacatgatttttggagaggtcaggaaccatacaaagacaggggaagagagtgctaaggaagccatcctgggaataaacttttcctgtcttatacccaactccttcaggggacgaatgtctgccacctcctcttttatctccccagccctcactgcactggattttacaaccctatcatggggttaccccctgtactagagcttcatgtaaatgataccgaatcaaaagaaaaagtcaagtggcaggtaatgtgtcctccagagcaaatgtttgtcttgtgttttacacagaactttttaaaatgtgctttaaaaacaaaagactgataaaatgaacattacagtttggtgaaaattatgtcccagcgcctctctctctcccaacaagaaacctgttttccaatcccctgtcctaagcaccaggcatatacaccaccgactgaaagtataaaaagacactctgcagtctcctaagaatggcatctgaattgtcttgtcagtttggtttctactctcagtgcaaatatctttaaataatttaaagtggaaccccaccaacgtttgccactacacttactctctgaacctggacgtgtcgctcttttgtgctcaatttcctaatctctgaattataatgatagagaaagcattttacttatatcccagggttattataaggaaaacacaaaataatggaatgggaaaccagtatgtcaatagtataaatacattatttttttctgatttctagtatattttgaagatgataaattatagggatattcaggtaatgagaaattagttcaagcagtaactaaagaattaaatctgtagggcaggaggttttcagaccactaaaaaaaaaaaaaaaaaaaaaaaaaaaagtgtgtcttctgcttttgttactaaaggccaaataatttgactcaatcctcccactgtgttcaactagaaagactacacagaactttctaaaaatctgttagaagtaggaaggtagcaaaagattataggaccaagagccaaggaagacagaaatccatagaagtgagccccatgtttg

SEQ ID NO: 94450 - DNA, 81327 bp, Homo sapiens
  misc_feature (1)...(81327): n = A,T,C or G
cctgcctcagcctcccaagtagctgggattataggtgcccgctaccatgtccggctaatttttgttctttttttttttttttgagatggagttctcactctgtcgcccaggctggagtgcagtggcgcgatctcggctcactgcaacctccgtctcctgggttcaagcgattttcctacattagcctcccaagtagctgggactacagatgagtgccaccatgcccagctaatttttgtatttttttgtagagacggggtttcaccatgttggccaggatggtctcctgatctcgtgatctgtccgcctcggcctcccaaagtgctgtgattacaggtgtgagacaccacacccggaacatttttgtacttttagtagaggcgaggtttcaccatgttggccaggctggtctcaaactcctgacctcaagtgatccgcccacctcagcctcctaaagtgctaggattacaggcgtgagccaacgcgcctggcccggaatgacaaagtcttgtaacagaagcccaagcaactcttgctagggaagactccagtaatggcaaaaaacaaaatcatgcaaagatgcaatgactgctcaaatcaccccaaatcagaaagtggcactggctgctaacagaagcctgaagtctcccaccagtgagaagtccaggcccaggaaacaaggcctaaaggggctggcacagtcttcatcctagccaaatgcaatcactccaaaggaagtcccacatcagagatcaaaggcctgctgagtaaggagagacaggccacaggctgatatcccattgccaaaggaagactgtcctttgcaagtgtgcctggtggagctctggacccaagtaataggagaagctccaagtctctacaagtagacctagcagagctggctgagtcagcaccccacagtgacactgtcttttgttttaagacaaggtctccctctgttgcccaggctggagtgcagtggtgtaatcttggctcactgcagcctcaatctcccaggcacaagcagtcctcccacctcagcctcccaagtggcttgtagaaatggggttttgccatgttgcccaggctggtcttgaactcccgagctcaagagatcctcctgcctcagccccctaaaatgctgggattacacgagtgaggcccctcgcccagttgacactgtctttataaacctcaggcccctgcccccttgtgccccgtggccaaggaggactaatctgtggctgcaggccaggagaggctgagcactaatcccaaggagaagcccaggcttgactgtgagaaaaggcccctccctggctgtggggcatgtctccagccaagtctatctcccacatccagctctgctcaccttctgctcctccggcacctggatttttcttgccttcttcatgattggctggggcttaagttcctcttctgagaagcgatgtcttcgagggtcaaaggtctcgtggccaggaatgcttgatagggcaagatcagctgggtcgggttcaaaggtcatcaacacctccacggtgtctgggtccacagggctgggtgtgtcccgagaggtcaggccttggggaaacagcacgtgtcagctgagtgtgtattttaaggagggggtttcctgaagctactttttgctgtggtatcatagccacatggaaagtccttctgggatctagcataaattcggccagggattaatctccctaatataaaatatgaaggttcccttggccaggcgcagtggctcacgcctgtaaccccagcagtttgggaagccgaggcggcgaatcacctttagtcaggagttcaagaccagcatggccaacatggagaaacctcatctttactaaaagtacgaaaattgcccaggtgtagtggcgggtgccggtaagcccagctactagggaggctgaggctggagaattgcttgaacccggaccctggaggtggaggttgcagtgagctgagatcataccactgcactccagcccggacaacagagcgagactccgtctccaaaataacgagaaaaatgaaggttcccctaagccataaagatgcttagagatcatggagccatatccacctttacaaacaaggaaactgagtcccagtcataactgacttgccctaggtaacacacgaatcagggctattgcttctacacttgatcttagccaaaaggccgagaagcgatggggctattgcttctaaaacctcaggacttcagatgcacagtctagcctgaatcctacttaccgaatccacgacctaagcttagaccccagactgtccagagaaaaagaatctactgcactgaaaagctctcaagttagagtctaagagctactcgctggaaagaggaggagaagctgctctaaggttccagaagattggttcgaaaggaggcgcctgtacctttaagcaccagccagccggggccagctaaggacacaggttcagggccgagtcacgtgctgacgcctgcttccctcctcctcccttcctcccaggcccccgccatcggcgccctcacgttcccccggccccgcccccctcgcgcttgaaggcgcctgcgcgaagcgcggaggagggatgggaggactcacgtggcgcaggaatgtgccgctgggaagggtagggccctggttcggcccggaggtcggacctggagcaggtgtgcccaggaatccccgacctgcagtccgtccctggagacctcaatgtgcccaaagggaaacatctttcctcttgctcttccagtcacttagttccactcaacctccaaagattcccaaccccctgctctccggggagcatcggcctcctggaccttcccagaacccccgccactgggctaccacgattctgggatcccaggcctctcctaggaatataggaagcttggccccagccccaattggaggatccagaaacaagatccctaacgttttcccttctgaagaactctgggacccggggctgcagcacgccccactgggggacccagggacctgggctgccagtctcttatgtcctgggtaaacagaattctgtgcctctcctttgcctttgcccctgtaaaggacctaggggctccagtcctatcccagttccatcgattatgggcccagattcgggggtcagtccactccccagtaaataactctggtgttccggacttccagttctggcttcacgagtatccacatcgtttgtccccaagtcccacagaaaaacccacaaaatctcattgggcaggcttcctggaatttagggttccaagtctctcctcccccatggatccattggtccctgacccattaagagacaccgaatctggccccctcccacgacacctctcgacaactggacacagaattcgaggccgcagccaggtcccacggtcccagcccccagcgtcgcacagccccgccccctgagtccaagccccgccccgtcaggacccgccccgcccccttcgccgcacctgcgcggtggccgctggcggtcccgagggcagcccgggcgggggcgtgcccaggagaggagcggggggaagccgagccgcacgaacccggccctggggagggtgcgggcgtccgcgcgggcgacggctccggcgacgggccaccggggggcggcgggctgggcgggagcccgtgctccagcaggaaggcgtccaggtctacgtactccacatcgccgaacggcagcgtgcgctcccacagcagtggcgccaacagacccggggcgggcaccggccccgggcgcccccgcggggaccctccgcccaccactgccccagccggggcatccgccgggcccgcagtctccaggcctggcccaggggttgtggctgcaggcagggccgccttgcgctccttttccttcaggagacctgcgggccgggaaagacgggttgggatgagggtgaggtgggggagatagagatggagaagagaccccgagtccgagaggcacagggcggagatccagagaaagaggggacggggggtcggagaggagagacgggagaaaaagggacggagacgcagagtgggagagagacccagaaagaatggagacgggggtggcagagacaggtggacagattcacagagatggggacagaatgccgggaaggaatagacacacagaaagacagcgaaccagagaaagagagacggaagttcaggaataggggggcagggacagggtaggtggagggttgggcaggtgagagaaaaaatgacagctctgtaatttcactgtaattacccaacccccatcccctgcgcgctgtacccccttcccctcccccaccatctgtaaggggcaggaaggggctctattcctggggcacatccctcatccctagactccatgtgaccccatgacgccccgcccaagcccgtgtcaccaccgtgtgagcacccgacacaccccctccctgggaccccaggggtccagactcccggaccaaaaggaagaggaggctggggcctacactcttgtgaactaagcggggaggacgttggggacgttggtgcctgggtccttagggtggacgggcttcagagccggcgcttttgggtcctgggcgctaagggatctaggggcctaaacacctgagtaattgagtagattaaggttgggaagatggactccccgcacgcaggtttctatgggaccccaccccacggcacctgagtccctaagggggtagggtgtccgaagtgggtgagatgggggttagaactcacagctggccggctctttgggcttgctggtcccctgcagaaggctccgcaacccaagcagcgctcccccgccagggggtgtcccggccgggccgcccagcagcagaggggccggggtcctgtcgctcacaggccgcgccatcgcctggcacctgcccccaggctcacgggttcatggagaggcgaagggctggcctgccagtcaccagcacactccagtggtttggacgagtgtctgcccaggggcgggcgagtgtagcctgcaaccctccagtatccagaacgctgcaaatcctaggagcgacggggatttgaggtcctcggtgcagaaacgtgcaactcaagagggtcccgggagatcatgcaatctgggcgagggggtgtccagatcaagcggtcggctctttgcaaccgagggtgagaggggactcaaggcgctccttctacaaggtgggcgagcctggctcttgcaaaatctgcagctctcgcaacggaaggcgctttgcaatctgcaccgagaggtgtgcgcggaggggcggaggagggggcaggaggaggcggccgccttgaggcgtggccaaagcaaacttctttcgcggaaaaaaaaatccaaaccaaaacacccgacgccacagcgcgcgcccctcctccgggtccccgcccggcgcgtccagccccgccagcctctatgggcatgcaccccagccgcgtgcctccctccggctgcaaacacggaccaatcgtctccgacaccttgagacgcacagccaatggggcctctgggtccgccagggcccaggagggcgcgtgaggggctcagcgcgtgaagttgccttgcctttcggtgggaggcgggacactgacctacatttgcccaatgggaggcggtactggggggcgggaccgtgacccagtttgggccaatgaggcaggcgggagggggaagcacatggctctgctcgtgctgcctgatggcgaggggggtgatggggggaaaaggggcgccgcttaaaggggccgcggtcctaaagatggttttgagaagcaggaagccaaaataccgagagcggaggtttagaaagaggaagattggtttccggaagaagtctgttctttaatacccaaatgtttccccaccgcgcctagaatcagaccactgagaaaacaggaagtattctgtccctttaatagctttgttttaggggtaactcccctcgccttgtggggaggcttaggacgggcgggtgcaatcctcgaaggggagtctcagcgaccatgggggacaccatccactgtaagacagagaacaacggcagggggcgtcagtataggatggaaggggcggggggtgtgcagggggcgtgggctgcgccgcgctgggccctaccgtcggaagtctgcgagcggggaaccagaatgtacyaggtcgagaagcactgggctgaaccacaagaagccaataggaggggggaatcgggacgtccagattcagcagtaggctgaactacttgaaggtcttcatggggggggggggtgtggactgtaccatgttgcgaagccgggggtgtgtgagattcctgggctaaaccacagggaggcagaggtggagggaaggggttgtaccttgtagattctcagtaagggggaagggagcatcagattgtggaacagcgtaaggtagtacgacttggaaagggagagaggatccaaattgtaccattttggaaattcacagtaataggaagcacagaacagtaggtaattggaccataggaaggcaggggtcaagggttatagaccaagttacaaagcagtgaagaggaaagacaaatcgtgggctagcaatggcctagggctggcaggtggactgtaccacatagacatgtagggaaagagagaaaaagagacagctcacgaggctagaccatatagacgcaggaaggaggatgggactgaatcacactgagacaccaaggggagacacatataagagggttagcccaagacttagagggggtgcagactggaccataccatgcaggcggtagttggggcctcggcagcgcctctcggggtgccgggggtccctgttgcccctcagtgccctgtgggccaagggctgcaggggccggctgttaccgctgaggctctggaagatctgagatggaggattctggctcaggagtctcagggagtgcatctgcagtggaaggagggtgggaaactgggagtgaatagtgaatggtcttggtgacgtcacgcaggaaaccccgcccctgggagcaggtgggcggggtctgttctcagccccacccacccccaaggtggtctgaccctcttacctacttgagttcagtctatgaggagagggagggcaggtgagcaaggggatgcccaggccagtgagtggagtacccaggcctaggaagggcggtgcggacagagggtcacctgaagggaggtgatattgagggcccggtcaatgaggatccaggtgacagtctcggagcagggcggggtgctgagagagccctgataggtgatgaagccgaaggattcagggaacaggagctccaggctcaggtcttgaagaaagtaggcatcatctgcgggaatatcaggccagagtaaagagggatggcactcttgaaccccctcgtgtgtgaccactgcccccagcacgccagggacttactcttgtaggagatgcgagtgatggtgtcgcggttaaggaggcgactgaggaatgggttagaggtactggcaacctgtgtgggggtacgaggtgaggacacaggagcccagaagtccaagccctcaaccttctcctcccccaggacccaggagtctgggcctcccagcaccccgcttccctcagaccccgggttccaggcacccaactgctccctccctcygaatctcgcctccgctcacgttgacaaagaggctgagaatggccaggccattggggccgcgggaggcagcgctgaaattcccgtagagttcctggttgaagtgaatgagctgcacctgggggtagcacagagcatggggtcccccagcagaaggggaggagagcatgaccccagctttgggggcccgaatcaggctgaggattagtgcttagggtgggaggccagttctgtggaggaggatggggtgagacactaagagggtgaggtgggaggaattggggtgactcagggcggagggtggcgggtaaacaatcagtggccactacctcagcagagaagccctggtggttgatctgatgttccgagccggctccgtcgcgagctccaaacagcagccgcagttcactgagtcggtggctgtaaaggaggggacctccagacacattgaccacaggtcggggtgcaggcaggaaggagacatgtcggccggtgttgtacaaggttccccggagctgtgggagaggcgggagctgtcagggggcagggagagatcttttatctctcgtttcccacgcctacattttctgattccaacagtcttttttttttttttttttttttttgaaacggagtctcgctcttgttgcccaggctggagtgcagtggcgtgatctcggctcaccgcaacctccgcctcccgggttcaagcgattctcctgcctcagccttccgagtagctgggattacaggcatgcgccaccatgcccggctaattttttatttttagtagagacagggtttctccacgttggtcaggctggtctcaaactcccgacctctggtgatccacccgcctcagcctcccaaagtgctgggattacaggcgtgagccaccgcacccggtcttttttttttttctggggggagacggagtctcgctctgtcgcccgggttggagtgcagtggcgagagctccgctcactgcaagctccgcctcccgggttcacgccattctcctgcctcagcctccagagtggctgggactacaggcgcccgccaccacacccggctaattttttgtatttttaatagagacggggtttcaccgtgttaaccaggatggtctggatctccggacctcgtgatccgcccgcctcagcctcccaaagtgctgggattacaggcatgagccaccgcgcccggctttttgtttttkttttttttttttttaaatagaatctcactctgctgccgaggctggagtgcagtggtgagatctcgcctcactgcaacctctgactcctgggttcaagcgattctcctccctcaggctcccgagtagctgggactacaggtgtgtgccaccacacccagccaatttttgtatttttagtagagacagggtttcactgtgttggccaggctggtctcaaactcctgacctcaggtgttctgcccaccttggcctcccaaagtgctggggttacaggcgtgagccaccgtgcctggcctccaacagtaatttaatcattcaacataatttgaacactgaccactttccaggctctgtgccagtttgtaagttggtgcccaatattggtgaatttgtttgattaacaaatattgactgagctggtgctatgtgccgtggatgcaagaatagagcaataaacaagtagacaaaagtcctgggccttatggagtttatgttctaatgaaggcaagacagacaattgtgaatcacataagtaactgcttaattaaytacatcctgagctcatgtttgggggaactgggagctctgaggtgtcatggggagctcagcttagatgggggatgtcaggaaaagcttccctgcaaaggtgacattttatttttatttatttattattttgagacaaagtctcaytctggcacccaggctagattgcagtggtgccatcacagctcactgcagcctcaaactcttgggctcaaacgatcctcctgcctcagcctctcaagtagctgggaccacagtcacataccaccatgcccaactaattttcaattttcttttttttttttttttttttttggtagagagggttctccctatgttgcccaggctggtcttaaattcctgggctcaagtcatcatcctgccttagcctctgaaaaatactggaattacacgcatgaagcactgcacctggccaaaggtgacattttaatggggacctgaaggataagcaggggtgacttgcaaaagaacaaagagaagggcattccaaraagagggaacagcaagtgcaaaggccctgaggtggcctgtttgagtaacagcaaagagacttcatcaaagtccagtgaacagaggagagagaggttatgggggctgaatggtgcaggaccttgtggaaaacagtagagagttttgtatttttatttaaataaactgcatatataggctggatgtggtggctcacgcctgtaatcccagcacttygggaagctgaggtgggcagatcaccagaggtcaggagtttgagaccagcctggccaacatggtgaaaccccatctctactaaaaatacaaaaaccagctgggtgtggcggtgggcgcctgtaatcccagctacttgggaggctgaggcaggagaatcgcttgatcctaggaggcggaggttgcagtgatctgagatcattccattacactccagcctgggcgacagagcgagactccgactcaaaaaataaaataaaataaaaataaataaactgcatatatataacacatttgccagaatgccaaacatatagtaagtgctatgtaaatgtttgctgttattacatatcctaataggaggattttgagcaggagtgatatgatcttatttgtgttttaaacatctctctagctgtggggtgaatagattgcaggaagttgagaggcaggccagtgaggagggtacgccaccagtccaggtgggagatgatggtgcctacatgagactgggggcagtagagggcgtgataggtgaaaggatttgaataatatttagcagcaaggctagaaagaacatggattggaaatggacatgagggagagaggataggatggggaatggctttgaggcttttggctggggcagctaaatgaaaggcagtgccggctcttataagaaatggtattggccaggcgcggtggatcacagctgtaattccagtaccttgggaagccaaggcaaggaggatcacttgaacccaggagttcgacatcagcctggacaacatagtgagaccccacctctacaaaaaacttaaaaagttagccaagcatactggcatgtgcctgcagtcctggcttcttccttcctttccttccttcccttccttccttccttctctctttctctctttctttctcgctctctctctttcttttctctccctctctctctgtatttatttctttctgagatggagtcttgttctgtcacccaggctggagtccagtggcgtgatgtcagctcactgcaacctccgcctcccgggttcaagcaattctcctgcctcagcctctcaagtagctgggattacaggcacatgccaccacacccggctaatttttgtatttttagtagagatggggtttcaccatgttggccaggctgatctcgaactcctaacctcgtgatccacccacctcggcctcccgaagtgctggggttacaggcatgaaccaccacacccaggcatgtcctagctatttttgaggctgaggtaggaagatcacttgggcccaggaatttgaggttacagtgagctatgactgggccactgcactccagcctgggtcacagagtgagatcccaattccaaaaaaaaaaaaaaaaagtatggttcccagcatggtactataaagcaggtcccagcattcatgctacgctgcttggtttgaatgccagtgctggctctctgtgtgatcctaggcaagtaacttaacctctgtgtgtcagtttctgcatgtatataataaggttaataattgtacccattttggctggacgcagtggctcatgcctgtaatcctagcactttgggaggccgaggcaggtggatcacctgaggtcaggagttcaagaccagcctgaccaaaatggagaaaacccatctctgctaaaaatacaaaaaattagctgggcgtgatggtgcgcatgcctgtaatcccaactactcgggaggctggggcaggagaatcgcttgaacctgggaggtggaggttgcagtgagctgagatcacatcattgcactccagcctgggcaacaagagcaaaactccatctcaaaataataataataataataacaataataataattgtacccattttgtggggtggttatgagatgagaggcttatcaaggttttaaatctgcctggcacaggaaatgttctgcttttcattgcttctgcagagatggggagactaggggaccatgcttgggatgggaagaatgggtgatccattttacagtgtaagcagcctcctctccacccactgggtgtcccctcctcccccaaggctgctctcctacctcagcaccccattccccagcctctattcatgcccatccccagtgggttcaatagctcctccctccaagccccttaccttctctcctccagtgctgagccttaatgggggcagaaaggggtcataaagaaccctcttcasctccacatccacggggctctgccgcttccccacagcacacagactccacgctgcattcaccaggccccagaaaggaggccctgggggtggggtcggagtaggaggacaaggagtcagaaatagagactggatcccagggctggtatctgctgagtgggctgtggtctggactcccagatcccaggggaggaggggctagggacctagactcctgggtctgagggaggactgggctcagatccagaattctgggtcctagaagaatcttggaatagtttccaagtttagcagagacgggtttcaccaagttggccaggctggtcttgaactcctgaccacaggtaatccacccacctcggcctcctaaagtgctgggatttcaagcgtgagccaccgygcccagccgatcaaacccatcttaagccactgtagatggaactacaactcccagcaggccccagtgctaccagcctacccctctgctgcctacctgccccagagccccgtgggagttgtagttcttttttttaatcgctcttatcccacagctggattattattaatgtgttggggagaggagctgcaagagaaggctggacaaggtgggggacggggccacccagcctctggttcctagcaggagccaggaccttcctctcccggcaaacacacacataatctccacccccacactttccttccactcactcccactcactacttgaaatgcgcatgtataatgtcccatggkgagcccctggggttcagaagctggcccgactcctgagggacagaggagggggctgggactcctggtcctgggggggaggagggagctgggaacccaggttcctgagtctgaagaaggaggcgccgggagggccggactcctgggtccccgccttggcggcacctggcacgaagtttccctggagattatccttgtagctccaccagtcctcggggtcaggtgctggtccgatgtkagctgggaagagagcagcctgaatccctctccttggcatccccayctcyaccctccctcgggggctcctcccgggaaccccaggtcttasctgctgcccccagtgcagcccagagtaccagcgctcgaggggcgctcagacgagctgcagcccccatccccaggaggcctccgagggacccctgcccaacgccctgcccccctctctcagctcctctgtcccctccttctgggaccctgtccctccaggacttccagctttcctctcctccccacagggagtcccagttccccaaatgccaaagcagccagggactgagatccgcccttcaaacccactcttcttctctctcccgtctctctgtgtctttcctctttcctctgctcttttcccggaaccctccagtctccctctagctcctgatcttcctactcctctcagccttctgctgcccccagggctacctcttggttcctaacccacacctcctctccgttctcttttcattaagctctcccaagccacctaactccaggtctccatcccgcatctcctcctcctcctccctctctcctttccagctcctgcctcttctcccctctctccttcttcacctcctcccgccctccctcagtgtcggcctccagcttcgtgctctccccacctcctcctctcctgcctcttctccctgtttcagtctctcttctctcttgtcccttcctccctcctccccctccctctctcctctcccgtggtgttatttaattttgttgttgggctgggggagcaggtgatctcatagcggcaaacactcctcgggttggcttggggtgggatgtgcgaaagggcaggattcggaaggaggtagggggctggtcctcggctcccagccgcgctggggccacgcgggcgggggtggccgggacacctggggccgggagcaggctgtttccatcctccgcagcaaggggaagggggggcgcttaaggtggagctgggagtggcttcggaagtctccatgctgggggccgccggccttggcggatgcagggtccccctgctcgctgggacccaggttggagccgccccagcgcccgcagccccccttccccgccccagggctccactgggtctctgcctggggctgccttaacggggccgggggatcccctaggagcctgaagtgcagtgagggctgctcgcctggagggggaggcagagacctggcgagggagagaggggcggggaggaggagccgggagggcagaggcggagagcgggaggtgaggacccacatctgcgtaggctggggaggggaagggagcctgagatggatacggagaggaagggcggagggacagaaggttagagaggcaagaacaaaccgccagcaggagtgaggaggagggggaggaggtgaaggaggagggggaggagggagaggagggggagggagaggagggggaggagggagaggaggagggggagggagagaggaaggaatgaatgagagagatacagatagaggcagaaaaggagatacagagacgcagcgagacagacatggagacatagagacacacacttagagatagacagaaactcagagaccaagcagcagatggggtggggagagacaaaaagagagaaagagcgatccaaagacagagagagacaccacatttttgtatttggggagaagagatggggtcatgctatgttgctcaggctagtctcaaactcctgtcctcaagggatcctcccaccttggcctcccaaagcattgagattacaggcatgaacaaccatacccagcctcagagagaccacatattactgttgttgttgttatttattatttttcaccccgtctaatggtagtgaaactgctcattgtcttcttttattttcttttttgagacaagccttgcaatgtcacccaggctggagagcagtggtgcgaycatggcttgatccagcctcgacctcctgggcttaaacactccttccacctcagcctcccaaatagttgggactacaggcacatgccaccatgccaggctaatttttaaaaattattttttgtagagatgtagtcttgctatgatgcccaggctggtccggaacccctgggctcaagggatcctcctgccttggcctcccaaagtgctgggattacaggtgtgagccaccttgtccagcctgacaccaaacattaacgagacagagagacatagaaagagacacacatacatcagtacaggtggagagagacacagagagggagagacatagaaacacacacacagactgagcatggtggctcacacctgtaatcccagaactctgggaggtcaaggtggatggatcacttgaggccaggagactgagacmagcccggccaacatggccaaatgccatctctactaaatacataaaaacttagccaggcatggtggctcacgcctgtaatcccagcacttagggtggtcgaggtgggtggatcacctgaggtcaggagttcaagaccagcctgaccaaaatggtgcaaccccgtttctactaaaaaatacaaaaactagctgagcgtggtggcacacacctataatcccggctactcaggaggctgagacaggagaatcgcttgaaccgggtaggtggaggctacagtgagccgagatcccaacagtgcactccagcctgggcaacagagtgagactccatctcaaaaaaaaaaaaaaaaagaaagaaagaaagaaacacacacacagagctagagacagagacctgggaacaggcacacacacatctataaatagagacactcgtgcagagaaagagacatcaacagagaggaacagatggacagagatagagagacccagatagagggagagaggaccagaagcagaccaactgacatgatgggagagactacaaaggaatcagaaagacagaggtattcagagatagcaaattgggatggacattcaaagacctagagatggagagagacacccagaaagaaacccagagagtcaggggtggagagagacacgaagaaaaaacacaagaaggaaaggtacatactaataatttattgctggcggggcttggtggttcatgcctgtaatcccagcactttgggaggctgaggagggaggatcacttgagatcaagagtttgagaccagcctgggcaacatagtaagacctcgtctctattttttatgaaaaagaaaaaaacaggccgggcacagtggctcacacctgtaatcctagcactttgggaagctgaagcgggcggatcacgaggtcaggagattgaraccacggtgaaaccccatctctactaaaaatacaaaaaattagccgggcgcggtggcgggcgcctgtagtcccagctcctcgggaggctgaggcaggagaatggcgtgaacccgggaggtggagcttgcagtgagctgagatcacgccactgcactccagcctgggcgacagagcgagactccgtctcaaaaaaaaaaaaaaaaaagaaaaaagaaaaagaaaaaaatagttggggaacggcagctcacgcctgtaattccagcactttgggaggccgaggaaggcagatcacttgaggtcaggagtttgagaccagcctgaccaacgtggtgaaaccccgtctttaccaaaaatacaaaaattaggctgggcgcagtggctcacgcctgtaatcccagcactttgggaggccaaggcgggcggatcacaaggtcaggatttcgagactggcctcaccagcatggtgaaaccgtgtctctgctaaaaatacaaaaattagctgggcatggtggcacacgccgagattgcgccactgcactccagcctgggcgacagagtgagactctgtctcaaaaaaaaaaaaaaaacaaaaacaaaaattagccgggtgtggtgacgcatgcctctagtcccagctgctcgggasgatgaggcatgagaatcacttgaactcaggaagtggaggttgcagtgagccgagatcacaccagtgccctccagcctgggcaaagagtgagactgtctcaaaaacaacgacaaaacaaaacaaaacaacgacaaaaaaatctgttgttgtgtgacaaattaccctaaaactcagtggcttaaaacaacaaacatttattgtgttcacagttcctgagggccaggaatgtgggaatggcttcattgggtggttctggatccttcttgagggtgcagtgaaactgttggacagggctgcagtcatctcaagtcttttatgacctagtctcccaaagtcacacaccttttattccacgcatcagaaatgagtcactagatctagcctacactcaaaaggaaagacgttaggatcctctgctcttgggccgggagcggtggctcacgcctgtaatcccagcactttgggaggccgaggaaggcagatcacttgagatcaggagttcaagagcagcctggccaacatggtgaaacctcgtctctattaaaaatacaaaaattggccgggcgtgttggctcacgcttgtaatcccagcactttgggaggctgaggcgggcggatcatgaggtcagcagatcgagaccacggtgaaaccccgtctctactaaaaatacaaaaaattagccgggcgtggtggtgggcgcctgtagtcctagctactctggaggctgaggcaagagaatggcgtgaacccaggaggcggagcttgcagtgagctgagatcgcgccactgcactccagcctgggtgacagagcaagactgtctcaaaaaaaaaaaaaatacaaaaattagccgagcatggtggcgtgtgcctgtaatcccagctactcaggaggttgaggcaggagaatcgcttgaagctgggaggcagaggttgcagtgagccaatatcgagccattgcattccagcctgggcgacagaatgagaccctgtctaaaaaaaaaaaaaaaatcctttgctcttgaaaggaaacgtatcacagaatttggggattaattttcaaaccaccacaggtggggagaggaagagagacacagagttgtggagagatggacacttaaagacttgggaggggccgggtgcagtggcttatatctgtaattccagtgctttgggaagctgaggcaggaggatcacttgagcccaggagtttgagaccagcctggacaacacaatgagaacccatctcagcaaaaaaaaaaaaaaaaattttttttttttgagacagagtctagcaccattaccgagactggagtgcagtgatgcaatctcagctcactgcagcctctgcctcctgggttcaagcgattctcccgcctcagcctcccaagtagctaggattacaggagcctgccaccaagcctggctaatattttgtatttttagtagagacagggtttcactatgttggccaggctggtctcgaactcctgacctcatgatccttctgcctcggtctcccaaaatgctgggattacaggtgtgagccaccgtgcctggcctctgcaaaaaattttaaaaaccttgtcaggcatggcagtgcacagttgtagtcccagctacttgggaggctgaggtgaaaggatgacttgagctcaggaggtcgaggctgcagtgagccaagatcacagcattgtactccagcctgggcaacacagcaagacactatctccaacaacaacaaaaaagttaaggatcttgagacgcaatcatcctgcattatctgggtagactctaaatccaatgacaaatgtccttataagagaaaaaaagccatagggagattgggagaaggccgtgtgaagatcgaggcagaggttggaatgaggcagccacaagccaaggaatgccaggagccaccaggagctggaagaggcatgaaacattcgcccctggagtctgtggagggagtatggccttgccaacaccttcattttggacttctgaccccgagagctgtgagacaatacatttctgttgtgataagccatcatgtttgtggtcattttttgtgacagccagcctggggctggggagaaattaagacatggaacctggctgggcgcgatgattcacacctgcaatcccagcactttgggaggctgaggcaggcggactgcttgggctcaggagttcgagaccagcctgggcaacatggcgaaactccatctctatttgtatttagtaaaatttaaaaagaaagaaagaaagaaagacatggagtccgacagaggcagaggcaatgaaggaactagagctatacagaaagtgaaaggctgactgatactgcaagaagagcagactctacctaaaatgtagggctttcctcctccaggaagccttccctgaccgcccccccsccgccccaggctgggtcagtgcttgctgtgaacattcacaatgtcctgtgctacctccatgagagcatacatcttgttagaaagggactgtgtccccatgtgttccaccggagggcccaagcctgaccygtctctgagtccccagcctcactgcacacagagcctggtgtacggggtcctcaggagagaactcaggcattattgaatgaaaccatgctcatgatgtctttccctggagagtctgccagttcccatgtgcctgggtgacactcgggttttctgcagtgcccatggagggccttgcctcctccaggacgtcttccctgaactgcaagacatggccaggtgcctcttctaggctcccacagtgccctgcgctgcctccattgttgaatatcctaccaaatctcattgtaccaaggtctccctcctaccccaccctcccagactaggcaagtccctagtccgactcaggtcagggtgtcagaattttccagggagaccacaggagaatatgttgaatgaataaataagtgagtgaatgaaataaaaacacagggactgtggcactgagagacaggtgagaaaataatgtttttgtatagggcttaagaggaaggctttggccgggtgtggctcccgcctgtaatcccagcactttgggaggctgaggtgggcagatcacgagctcaagagatcgagaccatcctggctaacacagtgaaaccccgtctctactaaaaatacaaaaaattagccgggcattgtggcgggcgcctgctgtggtcccagctactcaggaggctgaggcaggagaacctgtgaggcagagcttgcagtgagccgagatagcgccactgcactccagcctgggtgacagagcgagattttgtctttaaaaaaaaaaaaaaaaaaaaaaaaaagaggaaggcttcctggtcctggtgtgatagaacatttgactttcttttttttttttttttttttttkgggaggcagagtcattctgtcacccaggctggagcacagtggtggcagagtctcatgatctcagctcactgtaacctccaccttagggttcaagcgattctcctgcctcagtctcccaagtagctgggattacaggggcccaccaccacgcccagctaatctttgtatttttagtagagacggagtttcaccatgttggccaggctggtcgctggtcttgaattcctgacctcaggttatctgcccaccttggcctcccaaagtgctgggattacaggtgtgagtcaccgtgcctggccaacatttaacttcctgactatctccataatcctaaccagtgctcaggatgcatcttttcccctcaagtcctccccacagcctccttctcagcttctcccccttccagtttccctccccttgcaatccatgccccacagatcccagagggttttatttttatttttatttttttttgagatggggttttgctttgtcacccaggctggaatgcaatggcgtgatcacagctcactgcaacctcaacttcctgggttcaagtgatcctctcatctcaacctcccaagtagctggtactacaggtgtgtgccaccacacccagctattttttaatttttctttttaaactgtatttacttatttatttatttatttaaacagggtcttgctctgtcacccaggctggagtgcagtgatgtgatcatagctcactcccaggctccagggatcctcttgcctcagcctcccaagtagctggggccacaggtgcatatcacacacccagctaatttctgtttttttgttttgttttgtttttgtttttgtagagacaaggtttcaccgtattgcccacactagtaattttttttttttttttttttgagacagggtttcgatcttgttgcccaggctggagtgcaatggtacgatatcggcttgccgcaacctccgccttctgggttcaagcgattctcctgcctcagcctcccgagtagctgggattacagacatgcgccaccacacccggctgatttcgtatttttagtagagacaggatttctccatgttggtcaggctggtctcgaactcctgacctcaggtgatccgcccgccttggccttccaaagtgctaggattataggcgtgagccaccgcgccaggccaacacactagtcattttttatttttttgtagcgatagaggtctcactatgctggctgggctggtcttgaactcctggcctcaagcagtcctcccaccttggcctcccaaagtgctgggattacaggcgakagccaccctgagtggttgtgttacattcagagtggaccctgcctctcccayggctcccctgcacctctggacagagtccccctcctcagcctttcttgtcgtgaccagattcttctaatgtccttgaagatccacctgtgagagaagttttctgacctgtaggctgggtttggggtactctctgggctcccccagtgagctgagccacctcaatgatgatgatgattgcccgtatcactctgttttaacacggtttgtctctcacacaaagctgattctgcccctcccctgctcacagacctcccatggctcctcagtgccctgggggaaaaaaacccaggtcctcagcctggtctgagagaacccacatgccctggccacccccagtccccagcctcatctcttctctcaccacagagacctcctgccctgggatctttgccaaactgtttcctctaactgggctccctttctcccttctctgctgggcaaattcctactcagacttctgcacacttcaggagtcccctcctccaagaagccatctggcaatgccacgaggtgggcaggggcctcctcagagctctggaagccacctgtgctgcctccattatagcgcaaagacagactgggctcggtgcccagagggggagggaacgaccaggccggaggtgggtcccagatgtggatttcatgcctattcgtctcgggtgctgggaacaaagtttgggtcatgaggaacatatggggcctgctctgcaccatgctttcatctcctatctccccagcccctgagtgggaggcggcagcgccaggcctctacaggcctgggtggttcccacagcccctcttggcctcctcactgctatctctttgccttcaactcccactgcccctgggagcctagaaaaatcctccttgatctatactctcgccttctgggttccagtctcctggaggaggtgtggactgtggactctgggtgtttaaattttatatatatatatatatatatatagagagagagagagagagagagagagaaagaaagaaagagagagagagagagagacaagagtcttgctctgttgccaggctggagtgcagtggcgcaattttggctcactgcaacctccacctcctgggttcaagcgattctcctgcctcagcctctagagtagctgggactacagctgtgcaccaccatgcctagctaatttttcttctttttctttctttctttttttttttttttttttttttttttgttgttgagaagaagtcttgctctgtcgcccaggctggagtgtagtggtgtgatctcagctcactgcaacccacctcccaggttcaagcaattctcctgtctcagcctcccgaggagctgggactacaggcgcacgccaccacacccagctactttttgtatttttagtagagacagggtttcaccatgttggtgaggctggtctcgaactcctgacctcaggtgatctgcccacctcggccctccaaagtgctaggattacaggcatgaaccaccgtgcccagcctattttttctgtgtttagtagagacggggtttcaccatgttggccagcatggtctcgaactcctgacctcaagtgatctgcctgccttggcctcccaaagtgctgggattacaggcgtgaaagaccacgcccagcctaaataatattaataacaaactcaaggccctgagcagtggctcacgcctggtgatgggattacccagcactttgggaggctgaggcaagaggattgcttgagctcaggagttcaaagccagcctgggcaacagcaaaaccttgcctctatttaaaaaaaaataaaaacaaaaaaaaacctagcctggtggcttgcgcctgtagtcctagctacttgggaggctgaggcaggaggatcccttgagcctgggaggttgaggctgcattgggctgcaattgtgtcactgcattcctgcctggaagacagagtgagaccctatctcaaaataaataaataaataataaactcatacagctgtcagtctgcactaggcactgttctaagcccattatatatattaactcatttaatcctcaaaacgtaccctgtagattattttctattattttattatcatcctcatattatagatgagaaaactgagcgatgtggctcagcagggctgggatttgtggttttgttgtttgttttttgttttttttttttttgagatggggtctcgctgtgttgcccaagctggagagcagtggcatgatctcggctcactgcaacctccacctcctcgatccaagcgattctcctgcctcagcctcccgagtagctgggattacaggtgtgcaccaccgggcctggctaattttggggggatttttttgtttttgttttgttttgtttttttctgttttttgtttgtttgttttggctttttgtttgtttttttctgtctagcggaggttgcagtgagccgagatcatgccactatactccagcctgggcaacagagcgagaatgtctcaaaacaaacaaacaaacaagagaccttgagatggggaagagattattctggattatctgggtggccccatctcccatccaagaactaacagggtctgaccctgcttagcttctgagatcagacaagatcgggttcattcagggtggtatggcggtagaccgggtgcccctcgtctaattacaggagtccttaaaagcagagaacctttcccagccatggtcagaaagagatgtgaggatagaagaggcaggaaaaatctgaaatgtgaaagggactcracctgtcgtggttggccgtgaagatggaaaaaggggtcatgaatcaggcaatgtgggtggcctctagaaactgggaatagaaaggaaacagattctctcttagaggctccagatggaatgcagcctcgttagcaccttgattttagcccagtgaaacccatgtgaggcttttgatctgtagcgtgtaagatgataaatttgtgttgtttcagctgctgagtttatggtaatttgttatggcagtaacaggaaaggaattcgacagttctctgttactgagcacgtgagggaattctacgtccccaccttcatacaactgagtggaaccacatgagtaatcccgatgaatgagctgtgattggaagggccgggagtcgttcctggaccaaagctgttttgcttgcataagaccattcagtgcttttcctctttccttgtctcagtgatcaaggatgccctgggttacgggtggtgctacaaggtggtgaacatctctcagcctgggtccttgactgtgtggaaaaccaacctttgccaacttgcatggaacatgtatatgaacaagaaagaaactttgtgttttctttttctttttcttttctttctttcttcttcttcttyttttttttttttttttttgagacaaggtcttgctctgtcaaccagtttggagtattgtggcccaatcatagttccctgcagtctggacctcctggactcaaacaattctcctgcctcagcctcccaagtatgaggactacaggcaggcacacaccacaatgcccagctaatttttgtattttttgtagagatggagtatcaccatggtgcccacgctggtctagacctgggctcaagtgatcaccagcctcagcctcctaaagtgctgagattacaggcatgagccaccacacccagccagaactcaataaactccatagagccaacagagctagcctaagctgcctaatggaaggtctcaatgaagtaaggaaactggcttgccataacatgaaaaggtgtgttccaggaagagaacagcaagtgcaaaggtcctggagcagagtgtgcttttttttttcctttgagacggagtcttgctctattgcccaggctggagtgcagtggtgtgatctcagctcactgcaagccccacctccctggttcacgccattctcctgcctcagcctccagagtagctgggactacaggcgcccatcaccacgcccagctaatttttttgtatttttagtagagacagggtttcaccgtgttagccaggatggtctcgatctcctgacctcatgatctgcccgcctcggcctcccaaagtgctgggattacaggcgtgagccaccgtgcccagcaagtgtgctttgtttttaaaggaataggaagaagaccagtgtggctgcagtgatgtgaatgaggaagacttataagaggtgaggtcggtgatgtggtggaggtagatcatgcagggctttgtggggcagggcagggactttgggttttattttgagagtgatgggaagccattcaagagtttattttttgtgttttgttttttgtttttttctgcattaaaaaatgcagaagaaaaaaaagagtttatttttagcgatggggtctcactctgttgcccaggttggagtgcggtgccacgatcatagctcactgcagcctccgactcctggattcaagcaatcctctgcctcagcctcccaagtagctgggactacaggtatgcaccaccatgtccagctaattttttttttttttttgtagagatggggttttgctatgttaccacgtttgctggtcttgaactcctggcttcaagtgattcccacctcagcttcccaaagtgctggggttaccggcatgagccaccatgtctgtcctgacatgatttaaagtgatcatcctggcttccatgtgaagaagactttcagggggtagtgatgagagtagtgtggggactattgtaataatccggrcgagcagtgatggtggtttggacaaaggtggtagcaacagagatggtaaaaatggttgaattatgggagatattttgtggatgtggacaggatttgctcatggattggatatgaaggtggagtatgggggcagtgaatgcccaactgaattggcttcaagagaggatgaaaataacaaagataaggaatatagtttttctggaacagaggacccttcttagaaaattccttggccgggcgcggcggctcacgcctgtaatcccagcactttgggaggctgaggcgggtggatcacctgaggtcaggagttcgagaccagcctggccaacatggggaaacccgtctctactaaaaatacaaaaattagccgagcatggtggctcgtgcctgtgatcccagctactcaggagactgaggcaggagaatcgcttgaacctgggaggcggagactgcagtgagccaagatcactccactgcactccagcctgggtgacacagtgagactccatctcagaaaaaaaaaaaaaaagaaagaaagaaaagaaagaaaagaaaagaaaagaaaatcccttaagactggtcgcagttgctcatgcctgtaatcccaacgctttgggaggctgaggcaggaggattgcttgagctcagggggtcgagaccagcctgggcatcatagtgagaccccatctctactaaaaaagaaaagaaaagaaaatcccttaaaagactcctacttcagagatgaccccaccctgggttcatcgggaggctaagggcaggttctcccagattatgtaacattttattggtggcatgggggtcaaatagtctccctggaggcaatttcttgcctttttccatctaaccaagagcaaacccagaacgtttgctggaaggcacctttctccctacctggtatcctgtgacatcatggcatatcctgactccccattggctgagaggcccagctttctctcagagaaggaaattattaggcaacacaaatctgactagcacccagttacatcataggagtgtgcttattgtattggccactttgttccaggtccaaatggacctcaggacagcgcggtggctcacgcctataaacccaccactttggcaggccaaggtggaaggatcacttgagcccaggagttcgagaccagcctgggcaacatagcgagacctcgtctctaccaacaacaaaattagccaggcatggtggcctgcgcctgtggtcccggctacttgagaggctgaggtgggaggattgcttgagcccagtaggtcaaggctgcagtgagctaccatagagccactgcactccagcctgggcaacagagtgagacccagtctcaaaaaactaaataattaaaataaaataaaataaaaaattttggctgggcacagtggcttatgcctgtaatcccagcactttgggaggcctaggtgggcggatcacctgaggtcaggagttcgagaccagcctgagcaatgtggtgaaaccccatctctactaaaaatacaaaattagccaggcgtggtggcacgcacctgtagtcccagctatttgggaggctgaggcaggagaactgcttgaaccggggaggtggaggttgcagtgagccgagatcatgccattgcactccagcctgggcaacaagagcaaaactccatctcaaaaaaataagtaagtaaatataactataaataaaataatttttttaaaaaagagttagaaacaaacaaatggaccttaaatcacatcccttcctctaagactccctgagtaccccctcagtgactctcctgaaaagatcacccaaatttgagattatgttgtttgctgtgggtgcaggggcaggggtcagggtggcaaggaaggtcccaggctgtggcaaccttccattccgtggtacttaccgcttcctgccttttgcgcccctcccctctggcgtgcaggccaattgttgagtgggaatacaattctgcttagcaccaagttatgtcataccactctgtggcttccgattggctattctttcaaaaatgagtcactcaaagtatctcaattcctttctcagagcctatcctgaggcccatcagaaaccaacagttcctacgtctggaattttctagaaatctggaactgctgtccctccctttgtgagatttcccgccttttccaaccaagccccgcccattggccttcggcctatcgtcaggcaacaccaatctgactagcacccaatgacgtcataagagcgttcttattggattggccactttgtcagggtcccgttgtgctgtggtcctaacttcagctccgcgtattgattcaaggccttgttcgcttccctctagagagtgtgccagcatcgatcaggggtctgtagacaaaaattcccaaagatttgagactttattgggggaaacagatcactggcggggaataagccacaggccaaaggaggaaatgytgggaccagaagtcccgcttgccgccttttgctaaaagttccgcacgcctgctcggcgtgggcgcaagcatagtgtcgtcggggctctgcgacgtctgattggctctctgcagtgcaccgtcgaggtagaaggctcakctcctagtcgctcccaaattactttgttggtgctcgaggcagccccatctcacgtctagtgctccggcctgggrctgggtgtgggtgcccgcacgccgcggcagcctccggcgcgctcctcctgctgcagccgcttcaggggccgggcccagcgcggcctccatggcagcgcgaggccgtggcggtcgaggatgaggcgcgtggggtcggggtcgcccacggcgctgcccagcagcaggtagtcggtgcctggctgcaggcgcaggcagccgcaggtcaggtcggcgcggggcacccaggcgtcctggtcgccgcgtcgcacgggctgcgcccgctgcttgtaaacggccagcacgcgcacggccagccgctgccatgccgggcccgccgcctcggacgctagcacctgcgcgcggagaactgtggggaggggagatgtcagcccaggtcgtggggagcttccagggtacctctgggtcccgtggggtcagtcacagtgggcaggagcccgagaccggtgggtgggcttctggtatcgcagtggggagagaaaccttgaaccttggagagtttgaccctaaatcgtgaggggtagagcctgctggaggaaacatctttgagataaggagttaaactatagtaggtggggctggggacagggcagaagaggcaggtccagggtctctaatgcagtggagtcagaaggtatcaatggtggaattcttgggaaggaggggtcacattgccgggggaggggctctgggataaatttcgaggaccagaagaaggaagagactggtccctggaatgtgagggctgaggtcatactgatagtgattcagaaaaacataaattttttttttgagacggaatcttactctattgcccagtctggagtgcagtggtgtgatctcaactcactgcagcctctgcctcccaggttgaagtgattcttgtgcctcagctgggtttacaggatcctgccaccacgcctggctaatttttgtatttttagtagagatggagtttcaccatgttggccaggctggtctcgaactcctgacctcaagtgatccgcccacctcggcccccacaaagtgctgggattattagcatgagccaccgcgcccggccagaaaaatgcactttctgagaggctgggtgggactctgactagccagctgggtctgcggggcaggagatccctgtggaaggtggggaaaatctttccacctgtgaaggcctagaacactagtgaccagatgaggttcctgagggagaagtctgcggtcctatacattgagagaaatagctggcgttggtctagatttgttggctgggccgaactcctgagtgtcttaagagagctgaatagcctgaggtcatagaccccaaggtcatggagcaggtgyggactggggattagggaaccgtgggacaagtctttatgggaagtggggctaaggctcaaatatctgggaccatgaagggaagcagaaagggtctctgagatagggaggacagggcaagagttcattccactcaaccagttcccctatctcttccatccctcagagatgtcaggctgaaggagatgatgaaactctgtaagccgaagaacatggggaaagaggagacacaggaaggtagtgaatgccccctccycastcccctccccatttgtcttctgccccatcaatttctagatcaggaaggggtttggaatccaacactccttcccatttaagatgagaaagtggaaggccagaaagggggtggcttagaagcagtcatcagaaccagctgtgtagccttcagctgtctgtctccccagcactcaccatggtcctgctggcagtacctccgaaggctcatgtgtaccctggtgtccgacatattgcagtagttttgacactgagggtctggggagggtcaggctgtctgcagtgggctcctggggcctagaccacagccttctgcccctgcccatccctccrttccatcttgatggccagctggggtacccaaacctttgggactgggctcaatgggtgacccatgtatccccatctggggacccagtcagcccatcctcattcccacttgccactcagggacctccgtgccagactgtcttaccagagctataagcaccaggagtagtggcaagggtggttgttgcctctggaattcctgtgagaccaaaggagaaattaacctcttagtcatttcccccaggatcccctcgcccctgccccgggaatccaggcacccaaactcttaagtgtttattcctttaggactcaagagtgcaagcatcccttgccttcaggccccaagcctccttttcctcaagagtccagaatttcagtccctgcttatccgagggcccagagtccagcctccagccttgggctcccaattcccaaggccccagccctcactgcagctgtgcactggagacctgggatgtctccttcccgctctactcaggcttgtggcctggcccctcaagacttacgctggcagggcatcctgggggagcggctctgctggtagccagggccacagcggttgcaggtcaggcctgtgacccctaacttgcaggtgcactgcccactggtctggttgcaggttcctcctgttgccccaatagggtggcactggcaggctacatgagcagaggagctgggggcatggggtatcagggccccagatgcccctcccaattccacagtgcctcctccctcagcctggggagtccaggcccccagcccctcttccctcagacccaggagtccaggcccccagcccctcctccctcaggcccagagtccaggcccccagcccctcctccctcagatccaggaatccaggcccccagcccctcctccctcagccccaggagtccagccctacctctgctccccccaggcctgtctgcaggccacactcacctctgcaggccctgcggctgaagataggctggctagggtccctccagaacccaggttggcagtagtggcagtgccgcccagctgtgtggtggcggcaccgctcacaaacacccccactccggccgcccgacagtctgaacagctcagagttgaaccggcagcgtcgggcrtgctggttgcaggagcaggctaggagcaaaatggggtgggggcgcatcagggccgagtgtgctgctccccagtcctcagctttcttcccatggccctgccctcatgaaaggaagccgtgagtgtccaaggtagaagagaatgcctgggtcccaggacatctctattattatcttttttttttgagacggagactcactctgtcacccaggctggagtgcagtggtgcgacctcagctcactgcaacctccacttcccaggttcaagcgattctcctgcctcagcctcccaagtagctggaactacaggcacgtgccaccacacacagctaattttttttttttttttgtatttttagtagagacggggtttcaccgtgttagccaggatggtctcacatcttttaaatgggtaggccgggctcatgcctgtaatcccagcactttgggaggccaaggtaggtggatcacctgaggtcaggagttcgagacccacatggccaacatggcgaaaacccatctctactaaaaataaaaaaattagttggctgtgatggcttgtgcctgtagtcccagctactcgggaggctgaggcaggagaatctcctgaacccgggaggtggaggttgcagtgagccaagattgcaccactgcactccagcctgggcaaaggagcaagactccatctcaaaaaaaaaaaaaaaaggtacattggactggagctggtaagtccggggggactcatgaacctcctgaacatctgtgaaactgggcctctaaagagtaggctgcatccrggcacgatggctcgtgcctgtaatcctagcactttgggaggccaaggtgggcagatcacctgaggttaggagttcaaaaccagcctggccagcgtggtgaaaccgtctctactaaaaatacaaaaattagctgggcgtggtggcacgcgcctgtaatcccaggtactcaggaggctgaggcaggagaattgcttgaacccaggaggtggaggttgcagtgagccgagatcacgccactgcactccagccagggtgacagagcaagactccatctcagaaaaaaaaaaaacaaaaagagtgggctatggcctgtggaatcagacccttttagccttgtcggtctctctgaccgtattccctggacaggtaatttatcccttctgtagtttgattggctgtgaaatggcatttataatgtttacttgaggcttaaatgagataaagtggataaaaagtgcatagcccaggcctggcggagagcaagtacttggctgtctagcattcgtacgtgcaggacaccctgcactgtgtttgatgtatttcatctccacaagggctctgtgaggctggcactattatcatccccattttacagagggagaaagctgaggcacagagaggtacagctagcgggtagttggaggcaggacttaaacacaggtcttctagcttgacagtctgagctcttagctcactccagtaatacacagctcccgtgaggattatttagcatgtgcattatcctgggagcgtttgtcaggtgttttaaggtggctctcaaaccttactgctcatcagaattaccagggaaatgttttgttgttgtttttattaaaaatacattaacagggcatagtggcccacacctgtaagtcccagctactctagaggctgaggtgggaggatcacttgagcctgggagttggaggctgcagtgagttatgattgcaccactgcactccagcctgggcaacagagtgagaccttgtctttaaaaaagaagcaaaaatccaaaacaacaacaaaagccagattgcaaggctcctccctaggctttctgatgggcccaaggatctgtatttccagcaagcactgcagagtgagatgctgatacagggggttcacagaccactcttttttttttttttttttttttttttgagacagggtctcactctcgcccaggctggagtgcagtggcacgatcataactcaccacagcctccaactcctgggctcaagggatcttcccacctcagcctcctcggtagctgggtccacaggcatgcaccaccacaccaggctactttaaaattttttttttaaagacggggactcattatgtctcccaggctcatggacactctttgaararacttggactgcagggtgttttgacactaagaggtttgagagccctggactggcaggtccctgagagcccggaagagttgtgggataatcagggagctcaracggctgcatgttcttggaaaaacaactccccctctcccagcctctgttttctccctgtccagagagaatccagatccctctctcccagggtttttgtgggcattcaaagtggcaaagctattcaratgatcagtgagttgagtcaggttttggattctttctgacccaagggtaatcgttttgcctcacttcccctgtggagaactcagatgagggagaggagatgcagaccaggatgtctgtgaagcccatagctctgccacaggcattagtctcacctggccaccctgacctttctccactgcagcattgtcagtctcttacccgggtttggagggcactgccctgctcagtctggggggatgtggtgaccctcaggacagcctccccagcgcccaggccctgtccaggcccaggatgaaggctgcctcatcctcaggcctggtgagtctcacccctcactcccctgcttaggtaaaagatttggccaaagaatggggatggtctgtaagttagcccatgtgatcttcatgtatgaagaaatagaggggcagaggccgggcgcggtggctcacgcctgtaatcccaacattttgggaggccaaggctggcagatcacctgaggtcaggagtttgagaccaacctggccaacatggcgaaacctcatctctactagaaatacaaaattagccgggcgtggtggcacacacctgtaatcccagctactcgggaggctgagataagagaatggcttgaascccagaggcagaggctacagtgagccgagatggcgccactgcactccagcctgggtgacagagcaagactccatctcaaaagaaaaaaaaaagaaatagagggccgggaggcaaagcgcatgggaggtggagagggaaggccagggtacacttgcacacgtgtgtatatgtctgtgtctgttggtagagttacctcccaggacctcagaccctgtaccaagtgtctcaggctggaggagggagggggtcagggccggaaggagctgacaccggctgtctctgaggaggggctgttggagggaggtagggaaggcctggtctggaagcacctgtgggaaagagggcatcgcatgggacattcctggggggcccctgtccagctggatggagcagcggattgttgcagcatctaggaactcagggctccctgggttaaatcccttgctggcaatgagacttagggcaagtgacctctctttgagcctcaccttcctcagctggggagtggcgactttggcaggtgctcaggaagccgttcctttgtgccaggtaccacattgggctttatttaaaggctttatgtgtattaatgcatttaattttcactacagcctgtaaaggatgtgctgttactatccccaatctatggtggaggaaactggggcaccaaaagattaggtcacttgcccaaggtctcacagcaggtaagcagaggagctgggattcaagcccaaatagtctggctgccaggccaccaaggccgtgctcctgtctgttgcctcttgtctgccacgtggtgtgacagtacccagcaggagcctggcagggacaggctgagaccccagaacttggcttcctgagctcagatcctggccctgccacacgcagccactgtgtgtccttgtgcaggggacttctgaactctaggcctgagtctcctcatctgtaaaatgggcctgatgacatccctgcctggcacacgtaggtgactgataaatatgtgtttaatgaccgaatactttccccctgtggttggtttgaggagtcaggtaccatccagctgtcctgttcccctacaactgttcaataaatattacccaagtacctgcatccagccaggccctgggatgggtgctcggaaactgttattacatcatcatcaccaccaccatcatcatcaccactatcaccaccatcatcaccactatcaccatcaccatcatcaccactatcaccaccatcatcaccactatcactatcatcaccaccaccatcaccatcaccaccaccaccactatcaccatcatcaccaccaccatcaccactatcaccatcatcaccaccaccaccatcatcatatcaccatcatcaccaccatcaccaccaccaccatcaccaccatgaccaccatcatcaccaccatcaccatcaccaccaccaccaccacgaccatcatcaccaccaccaccatcaccaccaccacgaccatcatcaccaccaccaccatcaccaccaccatcaccaccaccaccatcaccaccaccatcaccaccaccaccatcaccaccaccaccatcaccaccaccatcaccaccaccaccatcaccaccaccatcaccaccaccaccatcaccaccaccatcaccaccatcaccaccaccaccaccatcaccaccatgaccaccatcatcaccaccatcaccaccatcaccatcaccaccaccacgaccatcatcaccaccaccaccatcaccaccaccatcaccaccaccaccatgaccaccaccatcaccaccatcaccagcaccaccacgaccaccaccatcaccaccaccatcatcattatcaccaccaccaccatgaccagcagcatcaccaccatcaccgaccaccgccacggacgagcaccatggaccacgaccaccatgcatcaccaccattcacaccaccgtcatcagcatgcgacaacacgaaccaagcactcacaatcaccatcattgaccaccattatgcagctaccatcaatcaaccatgagcgcaccgatgaccgcgacccacgaccattgagtcgttgacgcaccaaccgatgaccttgggtcagccacgtaaccatgaaccaatgagcgaggcagcgagcctatgaacgatgtacgccgcgggtgatgacccattgagcgaggtgggcagtcgatgcatcgcagtcaccggtgtattggactctttcgcacctcggacgagtgttccctttgcagtcggcgacgtagtggaggcgttggtggtgtggagtgggagcctgtggatgatgctcgcgattgtgatcgtcgctgttgatgaggagcgaagatccgcgttggatgacgttgatcctcgacggtggatggtcggtggatggagaatcggcgctggtcgtccgtcgacgctcgtcgtagtgagggtgtctcggtcgtcgtccgtccgtcgctcgctggtggtgcggacggccggcgcatcggtcgatcgagaggatggtcggatcggcggtcggtcgcagtggtggttggagtgtgtgcgacgctctgtcggtcgaatcgctgcgtgtggccggcacgctcgatagatcggcagggatggagtggctctgatcggtcgcgtcgaggggttcggaggcgacccgtcattgggtcagattgcgtctgtcgtatatagcttgcttggatcggctcgggtctagtcgggtcgtgcggtcttcggtgaggatgggagggatgtctatggatcggaagcgtgtggatctcgtgtgacggtcgggatcgtctgtgattcgatctgcctgggacgacatcggnnnnnnnnnnnnnnnnnnnncaccaacggacacttcattcagccccctaccaccgatcaccacgcacccatccacccaccacccacccatcccccaccacccatccaccaaccatccaccctccacccacccaccaccaaccaccatcaccacccaacatcaccatcatcaccaccaccaccatccccaccaccatcaccaccatcgacaccaccaccaccacgaccaccatcaccgccaccaccatcatcaccaccatcaccaccaccatcatcaccatcaccaccaccaacaccaccaccatcaccatcatcaccaccatcaccaccaccatcatcaccatcaccaccatcaccaccaccaccaccatcaccatcaccaccaccatcaccatcgtcaccactaccatcaccatcacaccaccaccatcaccatcaccaccatcatcaccatcaccaccaccaccatcaccatcaccaccactaccatcaccaccaccatcaccatcatcaccactaccatcaccatcaccaccaccatcaccaccaccaccatcaccatcatcaccactaccatcaccatcaccaccaccatcaccatcatcaccaccatcatcaccatcacaccaccaccatcaccatcaccaccatcatcaccaccaccatcaccaccacagtcatcaccattatcaccaccaccatcaccaccatcatcaccattaccaccatcacaccatcatcatcatcatcaccatcatcacaggctgatgagtgttggggagaggctgagcccctcatgagcagacaggcccatgtgtggctgagatacaggactggctgcagggaggaggtatgaggggaccgagtctgagactggggtgagaggcaaggagcacccagttccagcgagggaagggaacatcctgctcccgtagggacaaaggacccagtggcaggcaggcaaaggcagggagagtgaggggcgcaggactcacgtaggcaagggtgggggtgccggggcgtggcaggccgccagggccagtctcgatgggacgggcggcagctctcgcaccccgggccagtggtatggtggcggcagtggcagcgggggggccgggcacgggcggcacagcgggcagcgtggccatgacactggcagcggcctctcagcccagctgccgctagcccggcctggcccccaaactccacacggaggtggctggccgccacagtggccttaggacctggtgtggagtggaaggtcaccctttcagggccccctaaggccccaggccaggcgggcctgtgccacagcagcctccagggaccccctgaggcccaggcagcagacaggatgagggctgggggtcctggggtacagaagcgcaagctgacagatgtcaggaggaaggggccacccagggccaaagtcaggctgccattgcaggtttccctggcgccaaggtggtttcctggggacagggcacaggcctgagggcaggaggccgccacggcagccagctgtgtcactggcgggaggcagaattgggggcggccctgtggatcgtagcatgggtccgcagtggcctggcccaggaggagcaggagggcaaaggtcacgggcatggtcacagcagagccagcacctggagggaagagaggtggctgggctggggatctcagccgcagcctctacccctcctggaggtgtcctgtggaactggggcattccacccccaacccgtccaggccccctccccggctgcatggaagcgaggaaaatagttccatctggggagaattactgtttacataacccaaaggggaaagaacgcagacaaaatcgagaattttgcctgaactaatccgtagcttaacaccccagagttatccgtcagtgtcgaggggcagggggccctggggagcggtgagcggctggagcagaggggctggccaaggccagcagacgtggaaacctagagagggacacagagacaagcagggctgggcaggagagggggcttagggacagatgaagactcagtcacaaagaaatagaggacaggacagaggcagagagaggacagtcagcctaggggaggcgctcggcacagagargttgctgcaaagacagaggaacagacaggaggctgagaggctgagacagaggccaggcacccagaggccacagggagctgggagactgaggctcggactgcctgggggctgggataggtgggcaggtgggctcagagacacccagcctggcaggccctggggaggggagggaaggggacaggctaggggtgtctggcgggggatcagaagtgagagaccgaggcccaggcctgcagggatcagagccattgcctttcccacatggggccctaaccttgttctccacaccctgggcacggaaggggattatcaccaaacaacccagcctccckgccacccgcccacccacccccagcgccccacccttaaccctttcccacccgagtgcaaagcccagagagctgagctgaggaaagggatgctgggagctggaacctgggtggctctggggcttgggagcgggacagtgggatccccatggggtcaggggaagcagacacctgggttcccttcagaactcagggtgtggggaccggaagttagcgttctgggactttctgctcacctcaaccctgccctctattctgggcctcagggcctggagaccagagtcccyacattctccacccatccagagttccccagagcagatgggggaacagatgttgggggyggtgggtaatgaggaggagagaggcaggaaggcaggagctgggacagggtggggtgccagatgccagggcgcccgtgggggcagaagcccagaccctaggaatggcaggagctgggaaggactggactctgaaatgcccccactttccccttccagggccagcagcctctggtgaggagctcactgtggactgggggcctcggagcctttccaggcccttggctctgaatctgcgcccaggaatgtccctgggctgggcatctctggggcaccctggcggttgaggtgggccacacctgccccagcctggcctcactgcccatgtccccactgctgttggccacatgcagacgctgcctcccctggcccagatgacaggcctcgccctccgccctcccaaggagcctggcgccattttgcacccactcaggtggcagccgcctgcctggccctcagcagcatcctgttaagggccagtcccccatgtcccctttctctctggatagttgctggatagttcagggggtggcaccctctggcccttagcaccttgagsaaccaggctgtgagttccctagtgttcctgggggatccagaaaccagtcgtggcccacagagagcccatacccctctttaagaaagagtccagccatgctcccagcagactcataggaggcctgcctgggcggcctggggtccatctgggacccaggcttcctttccctggctcttggcatgcaccccccaacccgagcccygaggccccgacattggccaaacctgcactcaagaagagagcgtcctgcagccagttccccgcaggctcttcctccaagctgtggcgcggtgggctctcaggagggagtggcgtggctgttctcaggccccaggctagtggggtttctgggctgggcgggggctcagagcagagcccgcagaatctaacaccgccacccccctcccaccccaatccctcaccaaccgcagccacgctatccccacagggacccctgccagccaggccacccgcaacggtgtgggacgtgagtgccgttgcccccggcggtccagcagcaggacagccccgagcagcctggcctaggaggctcaccgcaggtaggacgggaggctgtcagtcgggggtcccgctccatcccactccacccctgcccactggctcagccccgccttgtggtggccgccatcgcgatcgggcaggggctgacctttgggagacaatcgctgttggaaactttgctcagcccctgcctctggctgcgtgaccccaagccagcccctcctcctcctctctggaaccttttgtcagctgtgggttcaccgagccttaaggtcagtaaaatctgtgctcttggaaggttcagaccagcccctggaattcaaaagacctcagtcgctttctaagatggtggggaaggcgacaaatgagctgagaacacctgggccccagtgtttctcatgmggcagagggagaaggcggggacccccggggtgcgggggaccaagctcaaaagcacctccccagtgccgctggtgtcctgcgagtcctcagtgctttcatcgtgacattttcatgcgaatgttgctgtctgttctattccatytccgaatgggttgactagaaaaataatgttttctgtcacttcccgctgagaaaagcaagggcctcatggagttggggcgcggcacctgctgccctgggtggccccagcgtttatcgtggtgtagcgtgggcccaatcctgacaggcttgggacccactgccccaggcccgcccccagggggtgcgagggcacagcaaaggcgaccctcgactctggacccttaggtaccacrttggagggggccagatttggcaggagcaggacagggacatcggatttgaaagaagggagtcactccgaaagctgggaggtgcatcagctgcaggaggatggaatggggctgagacgccccccatcagagggggcatgtcagagctgggggcccaggctgtgtgagtcagagtggaacttcgggattcaggcgcaggtccctccgctgaccctgcctgagctccccctgtatgggactttgccgggggttcgcgctgggaacacagacccctgccccatcaggctcagtgtccagagagggagggggagaccccagcagcgcaggtccttctgtgctctaggttgttggaaggtgccaagtgccttggagcaaagcaagtsgggggggcggccacgggggccsggggattgcagatgtaagtggggtgatgcggaggggcatttgtgctgagcccaccgccagcacagaacccagctttgctgccacacaaaactgaggaagaaggcttaggtctcgctgcgtcttcctccccacctgggcgaagtctcaagctccggctcctggagggaagcttttgttccttgcagcttgagctgcctgagttgatgggcgcccctgcgggtgcccgggggcaggcggggaagaacagacggagctgccacagccgagcacatagtgccccaagctgggaaggagactgttttttttgttggggagagttctttaagggctggagaccttcaccctcacagcttctacagaaggccaggcctgcccaaggcacakctctgaggtgggttcaacccagagagaacctcagtgctgggctcacacagacctctaacccctgccttggtggcccagatataacggagtctccacgaggcagggcaggtcacccgcaggagttactgggcattgtgtggctgggtagggcctgccctcccggacatgttcaaaaaggccaggatggtaaccccagccatactgcctgggttcaaatccacctctgtcctagctgtgtgaccgagaacaagcttcttaacctctctgtgccttcatttcctcatctgttaaatgaggaagaaagaatggaccttcctcatggtgggcggagggggtcatgaggactgaatgagctgacatgcccacgggttcttatctgagctctctgggaaagtcgtgttccggaaccttctgcttcctggccctgttgtcggatgcatagtacgtacgtgacatggcatccatggtaggtctgggccgcatcacattgtcaaacatgttatgttttaggcagcagagcacatgggtgttcacagtaagagaagtaaagtctgcaaatagccacatgaccctcctccaagccagggttgtccccagatgagttcagtccaggttggcgtttgccgctccccctgaggaaaatggctgacaaggaatcgcggaccaggacagccagccccgtgatgggcctgcccgccagcaccctcgcagcctcggccttggctggtgcttttctgcggctttctggttgtctaggctgagaacagccacaagagggagcacctgagattccaggagaagccagagcagccgcggtacccactgcttgatctgcagggcctgggggaaaatgcagacacaggaccccttgtttagaatttatgaaggattttaagacggcaacaccagatcattaaagcaagcgtggggcctgtctcagcgcaactgcacgagtcacacaaaatgaaggcggaccccgcggggggcacccttgtcctgagctggtttcccttggccagtgacccaggctcctgtccctgccctgcacccccactgaccccagctctagccttgggacctgcctgggggctccagctgggctcagagctcagctccttctccgtggggcaggaccctgagttgagtggatggcaagatcatgtttgggacacagttttcaccagctcagtgaaaaaaggcttgggcagatttaattcactttttgcaaactaaagcagcaccaggagcatttttcttaggccttaggccagctggccttgctggggacccacacgagactttcaaggagggccccagagtgttcaggcttctcagaagggtcagatgaaccaaatgaggagccctggaatagaggaggatgacagctgaagaggcctggagggccccagattgttcaggcttctcagaagggycagatgaaccaaatgaggagccctggaatagaggaggatgacagttgaagaggcctgtaggcccccgatgtttaagaggacaggcggagggagagatggggagccgggaggggtgaggcagaagccagaagttttaggggtgagcccatgccaaccagggcttcagcaggaatggggtgggagggagggggtgaagggatgactgctgagctgtagccattggagtggccacagggaaaccataggacattggtcagaggagtggacaaggggagaagagaragccgatcaggacatggtagaggctgggagcagaggaccttctgggagccctggggagagctggaggagactcggaaagagcagcccccggagaagggaccatccatcccacggcgaggaccgggaccgaggtccttggagcccagtcaggcccagtggtcagggctggacctggaggtgaataggtgtgggccccacggtgagatggccctgcacacccaccacaaccaaacacgacggcgagcgaggctgggaaatggggccttcccgtactgctggtggaaacggaaactggggcagccacctggcagctcccaaaacgattcaacgtagagttcaccctgtgacccagcacacaggttcgtggcagcactatttgcaacagccgaaaactggaaacaactccagtgcctatcacctgatgagtgaatacattgtggtctacctggacaatgggactttcagtcttgaaaggagtgaggcaattatctgggcgtggtggctgtacctgtagtcctacctgtagtcccagctactcgggaggctgacgcaggagaatcactgraacccaggaggtagaagttgcagtgagccgagattgcgccattgcactccagcctgagcgacagagtgagacaccgtctcaaaaaaagaaaaagaaaagaaaggcgtgaggctgtgacacgtgctatagtgtggatggaccttgaaacacggtgccgagtgaggaagccagactcggaaggccatggagtgtgtgattgcagtcacatgaaaaatcgagaataggcaaatccataaagacagaaaggagattacttggtggggggacaaggaacagggaagattgtggggagatggttaaagggtgtgggtttttttgggaggggggctatgcaaatattcaaaaattgattgtgctggttgcacagctctgtaaatatactaaaagccattaaatcgcacaccttacgtgggtgaatggtagggtatattaattatatctcaaagtggttgccaaaaaagagctggctggacgtggtggctcacgcctgtaatctcagcactttgggaggctgaggtgagtggatcacctgaggtcaagtgttccagaccagcctggccaacatggtgaaactttgtctctactaaaaatacaaaaattagctgggcgtggtggcgggtgcctgtagtcccacctacttgggaggctgatgcaggagaatcgcttgaacccaggaggcagaggttgcagtgagccgagatcacaccactgcactccagcaagggcaacagagcaaaaactccatcataaaaaaaaaaaagaaaagaaaagaaaagaaaaaaatgaataatcataaccctacatacaaaagctaaaactggcccatgcctataatctcagtactttgggaggccaaggcaggaggattgcttgagcccaggagttcaagaccagcctgggaaacacagtgagaccccatctctacaaaaaatgtaagaattagcggggcatggtggcacatgcctgtggtgccagctactggggaggctgaggtggaaggatcccttgagcccagctgtgatcagaccactggcactccatcctaggtgacagagtgagaacctgtctcaaaaaacaaaagctgaactctccagcttgacacgatagtgcagagggaacattctcaaggcaagacatgaaagctgttagttctttaagtcctgggccagaaatggacacaatttcacttgcactatattaaagtggtcaaggcagtcatgggcccgcccagatccaagggaaagggagtccaggagtctgtggtggcttgaacccaccacacccactaatagtatcaggaaacgcttagcacttatcagtgcaggggtgtggcagccccatttcttggaggaggagaggaggagttaaataacacctccaggtcaccagcctgcagaaggcagagcctgtccatgaacttgggcccacctgtgctctttcccaaactctgcacgggcaccaaagattcttacctgttttttcctctgctggcttcctggccctgagcaccgtgcctggcattgtaataaatactctgcaagtattgattttatttatgttatttttattttttttgagacagtctcgttctgtcacccaggctggagtgcagtggcacaatctcggctcactgcaaactccacctcctgggttcaagcgattctcctgcctcagcttcctgagtagctgggattacaggcacccgccaccatgcccggctaatttttgtatttttagtggagatggggttttgccatgttggccaggctggtctcaagctcctgaccttaggtgatccgcccaccttggcctcccgaagtgctgggattacaggtgtgaaccaccgtgcccagccactgcaggtattgattttccaacacatacagggcatttcctgtgtgcgaggcactgctttacaaaatcatcacatttaatcttcaagcaaccccatgaggtagttctgtgaggtagaatcatagaaatggccgtgagtaggccaggcacggtggctcatgcctgtaatcccaccactttgggaggctgaggcgggtggatcacgaggtcaagagttcgagaccagcctggccaccatggtgaaaccccgtctctactaagaatacaaaaattagccagggttggcagtgcatgcatgtaatcccaactactcaggaggctgaggcaggagaatcgcttgaacccgggaggcggaggttgcagtgagccaagatcgtgccactgcacttcagcctgggtgacaaagcaagactccatcgccaaaaaaaaaaaaaaaaagaaatggccatgagtgtaggtaaaatcgggttaaatattggcactttcaaatagttccatctactcatccccatttaacaggtgaggaaacagactcagagaaactcagtaacttcttgttgtttttgagacagggtcttgctctgttgcccaggctggggtgygggggcacaatcacagttgactgcagcctcaacctcctgggctcaagcaatcctcccacctcagcctcccaagtagctgggaccacaggtgcatgccaccatgcttgactaatttwaaaaaaaattttttttttttgtaaagatagggtctcactttttttgctcaagctggtcttgaacttgggctcaagtgatcctcccatctcagcctcccaaagtgccaggattacaggcacaagccgctgtgctcagcgaggtgcagtaacttgactgaagtcacaaggtgctggtgaggctgggacttccagcaggaactcagcctcaggtggaaagaccccagggtctgtgctctgaggcctctcccatgcactgtggtgctcaggacagaggcttggatggattgagtgagtgaatgaatgactttggcagggggtgggtgaaragactcctgtccccccagccctgcctcctgaccatgtcctctctcctccccacagccrtcaagggattctgggccacccgcccttccttctccaccttctacttcgtctttgccrtttttgtggtgtccaccatctttcactgccaccagcacctggctctggtgcctgcgccctgggcatactcagcccgtgtggtcctggcccccagacacctgccccgggaggacctgttcactatcaactccaagggccgcctggggaaccagatgggcgagtacgccacgctgtacgccctggccaagatgaacgggcggcccgccttcatcccggcccagatgcacagcaccctggcccccatcttcagaatcaccctgccggtgctgcacagcgccacggccagcaggatcccctggcagaactaccacctgaacgactggatggaggaggartaccgccacatcccggggsrstrygtccrcytcacsggctacccctgctcctggaccttctaccaccacctccgccaggagatcctccaggagttcaccctgcacgaccacgtgcgcgaggaggcccagaagttcctgcggggcctgcaggccaagtgggcagggcaggcgaccttcgtgggggtccacgtgcgccggggggactatgtccgtgtcatgccgcgcgtatggaagggggtgctggccgaccggctacctgcagcgggccctggactggttccgggcctgctgccrcctcccggtctttgtggtcaccagcgatgacatggcctggtgccgggagagcatcaacagctcccttggggacgtggtgttcgctggcaatggcctccagggctcacctgccaaggacttcgcactgctcacacagtgcaaccacaccatcatcaccgtgggcaccttcggggtctgggccgcgtacctcgcgggcggggacactgtctacctggccaacttcaccctgcccaactcccctttcaacgtggtctttaggccgtaagcggccttcctgccagagtgggtgggccttgcggctgaccttggacaggctggacagaacrgcctctagccagccctgcatgtgcctggtcctcatcctgtgacccgaggggcagtgagtggggcgtgcggggcatggactcacggtccctcatgcagtttggatccaggcttatctacttcatagctgagtgagtttggacaactgactcaacctctgtgccttagtatgtcaaccacaaaatgcacaaaccacagaactaaacaccagtagcagctggtgggagctgagcaaattcgcttagagccagtgccttgtgaccgtgtgggaggtgtcggctgctcacatgtatgcagcacgtcaggaacactggcattgctttccaatggaaacgcagttttgccctctccttcctggcagcactggtagcacagagcccagatattttgcactcacgtcccaggacgaagccatccctgccctgaaggataggggaactcgattttctgggcaactaggaattttggctttggagttagtgggccttatcacaaaagaatgtgagggaagggccgggtgcggtggcacgcctgtaatcccagccctttgggaagccaaggctggtggatcacttgaggtcaggagttcgagaccagcctggccaacatggcgaaacccagtctctactaaaaatacaaaaagccaggcacggtggtgcgtgcccctaatcccagctactccggaggctgaagcaggaggatagcttgaattgggaagcagaggttgcagtaaaccgagatcataccactgcactccagcctgggccacagagcgagactccatcgcaaaaaaaaaaaaaaaaatagaattccagggaagacaggatttgcagggacacacctatgaggagggattcccctgcgatggacaggggaggggtttaggtgcaggtagcaccctgggcgcagggaagaaggcgtcacagtgagggcagaaaagacactcctcagatcctggaagcagcaacctgacccccaggggccactaagaccaaatcatggccatctcagcagcagcgtgtgtgacagttactggaaaaagatacctcacacctggcactgcctaacccccgagaacctaatgccactctgagaaagctcagtacgggtgcaagttggattaagtaattgcagtgcgagttttcctgtgttttattggtgtaatgctccttttggacattaaaaaaacttgacatatacaatgatcatttacatgcattaaacatttccaccaaatgtaggtgcagtggtttagaaaacattccaatcacatctctttcccatttgaaaccttttcaaggttgggtgcagtggctcatttctgtaatcccaacactttgagagctgagttggagggggatcccttgagcccaggagttcgagaccagcctgggaaacatattgaaacctcatctctacaaaaattagctgtgcctggtggcacacacccatggtcccagataatcaggaggctgaggtgggaggatcacctgagcttgggaggttgaggctgcagtgagccatgatcacaccactgtactccagcctgggcaacagaataagaccctgtctcaataaaattaaataaataaataaataaattgcttgcagctggtgccaaggaatggtagtctcccagtagacagaaaacacccgaagctggccaggtgtggtggctcacgcctataatcccagcacttgggggcccgaggtgggcggatcacctgaggtcaggagttcaagaccagcctggccaacgtggcgaaaccctgtctctaataaaaatacaaaaattaggccgggcacggtggctcatgcctgtaatcgagcactttgggaagccgagcctggcggatcacgaattcaggagatcgagaccatcctggctaacaaggtgaaaccccgtctctactaaaaaaaagaaaaaatmcaaaaaaattagccgggcgtggtggcgggcgggctcctgtagtcccagctactcgggaggctgaggcaggagaatggcgtgaacccgggaggcagagcttgcagtgagcagagatcgcgccagtgcactccagcctgggcgacagagtgagactccgtctcaaaaaaaaaaaaaattagccggtgtggtgatgcgcgcctgtaatcccagctatttgggaggctgaggcaggagaatcgcttgaacctgggaggtggaggttgcagcgagctgagatcgcgccattgcactccagcctgggcaacaagagagaaactccatctcaaaaaaagaaaaagaaaagaaaacacccgaagctggtgatcagcagcttcccaataagatcttgggagttcggcgagtgggcacaagcatgtgcactaagaggcaaaatagcagagtttaattggtacatgacctcctggggacattcagtgggtaagggaagaacgcttcaagtgagcacgcgtataacttcagtaaacacactgcgcatgctccccacccaggcgctggtaggccaccgcctaagtgaacagcccaccccaagggaggaactggggagaagggacgcaagaccccagaagtgtgccaacatataaaaccccaactcaaaaggtcaaactgcacacttgtctttcatgtcgcccgcttagccctcttccaagtgtactttcattccttttgtccctgctctaaagcttttcaataaactttctctcctgctctaaatgagagcctattgcccaggctgccttggtctttccttctgcctattcccctcagtcgaattctttcttcttaggagacaagaattgaggttgctgcagacccacacggatttgctgccagtaacagggtttgggcttgggaggtgttaaagaacacaggaggggccaggcacggtggctcatgcctgtaatcccagcactttgggaggcccaggcgggtggatcaccaggtcgagagatcgagaccatcctggccaacacggtgaaaccccgtctctactaaaaatacaaaaattagctgggcgtggtggcaggtgcctgtaatcccagctactcaggaggctgaggcaggagaatcgcttgaacccaggaggcagaggttgctgtgagctgagatcgcgccactgcactccagcctggtgacagagtgagactccgtctcaaagaaaaaaaaaaaaaaactcaggaggagggctgagtgcgatggctctttcgcccaggctggagtgcagtggcgccatctcagctcactgcaacctccgcctcctgggttcaagcagtcctcccacctcagcctcccaagtgggattttaggcacccgctgccacatccagctgatttttgtatttttagtagagatggggttttgccattttggccaggctggtctgaccrcaagtgatccttccacctcggcctcccaaacttctgggatgacaggcgtgagccactgtgcccagccaacagctttcacattacaaaagcccaagcagaagctggcaagctgccaacaagctgcactaattcatcaataaatatttactgagtttcttactgcatttgcaaattccaaagcagaagttggacagacacctaaaagcccgccctgtccctcaccagaaggggacaaaaggaagctgagcaggacaggggccacttaagtcccctaaagaaggggattgcataccccagcacctcagacagtatccagtgcacagcacatgttccttatggtttgacttgtgacgagtccccggccaagtttccttgtttcatttttttgagacagagactctctctgtcacccaggctagagagcagtggtgcgatctcagcccactgcaacctccgcctcccaggttcaagtgattctcttgcctcagcttcctgagtagcttggactacaggcacctgccaccactccctgctaatttttgtatttttagtagagatggggtctcaccatgttggccaggctggtctygaactcctgaccataggttatcctcctgcctcagcctcccaaagtgctgggattacaggcgtgagtcacygcacccrgcctcccttggccaagttcatatattaaagtcctagccccaagtaggacctcagtccrtcacccaggctggagtgcagtggcacaatctcggttcactgcaacctccgcctcccaggttcaagtgattctcctgcctcagcctccygagtagctgagataacaggagcacaccaccatgcctggctaattttttgtatgttcagtagagatggggtttcaccatgttgtccaggctggtctggaactcctgacctcaagtgatccgcccacctcggcctcccaaattgcggrgattacaggcatgagccaccgtgcccagccctggtcagtcttgaggtctgtgttgatgttaaacactggtcagctgagcctgaattacaatggcaggagggtataatgaggcatgtccagccacccagtcccatcctgggctgaactagtgtttcaggtttactttagaatgcccttggtctagagggagggtccattcagttacctgggggactgagaattttatttgtggtttacagtaagataattgtaggtgtaactggttaagtccaggttatactggagtagggtgtgtggtgtccctaatccgttatgacgggtgaccacacagacaccaaagaaaggaaagccacatgatgacaaaggcagagattaactctgggcctccagaactaagggagaacgggctgggcgtgatgactcacacctgtaattccagcactttgggaggccgaggcaggtgggtcacctgaggtcagaagtttgaggccagcctgcctaacatggcgaaaccccatctctactaaaaacacaaaaattagccgggcgtgatggtgtatgcctgtaaccgcagctgcttgggaggctgaggtgggagaattgcttaaacaggaggcggaggctgcagtgagccaagatcactccaacctgggagacagagtgagaccctgtctcaaaaaaaaaaaaaaaaaaagaaaaaagaaaaactaaaggagaatgattttcttttgctttgagggacccagttgtgtgttaccttcttagagcaaccggggaaacacatagarcgtctaatgcatattaattgaatggattgtacaaacagagcgaaaagagaaccccatggcttagcaggaaagcagcttagagatgaaaggtttcagtgtccttggcacagggcyagtagtcctggagatgatttcatggacactgtcccaggaagtaaaattctggaaatactttcattcattcaacaatatggtcatgggtcacttaacaatagggatgtgttctgagaaatgtattattaggcaatttcatgttgtatgaacatcatagagtatatttacacaaacccagatggggtgtgtgtgtgtatatatatattaaattcattttttttaatatggaaaacsaaatctccgagcaccattattgaatatcagtcatctcctgtacttcatctgcaatgccaatacaaagtgccagagatgaggtttctatatatgctctattataatattttattcgtttatttttgagacacagtctcgctctgtcacccaggttggtgtgcagtggtgcaaacacaactcactgcaacctctgcctcccgggctcaagtgctcctcctgcctcagcctcccgagtagctgggaccacaggcactcactgccacacttggctaatttttgtatattttttttaaagatggggtctcactatgttgcccaggctggtcttgaactcctgggtttaagggatcctcttgcctcagcctcccaaagtgctgagttataggcgtgagccaccgcacccagcctatttatttatttttgagacagagtcttgctctgtcacccaagctggactgcagtggctcgatctcagctcaccgcaacctctgcctcctgggctcaagagattcttgtgcctcagccatctgagtagctgggatttacaggcgtgctccaccatgcctggctaatttttgtatttttagtagagatggggttcrccatgtttcccaggctagtctcaaattcctggcctcaagtgatccaccctcctctgcctcccaaagcgctgggatgacaggcgtaagccaccgggcccagccaaattttaaagaaaacaggatatcaatttatatctcaaggcaaagagaaagaatgtaagttcttttgttgtttttgagattggttctccctctgttgcccagtctgatctcaaacacctgacctcaagagatcctcccacctccagcccccaaagtgttgcgattgtaggcgtgctggcctactttctgttctggttttctttcttttcttttctttttttccttttttttgagacagtttcactctttttgcccaggctggagtgcaatggcacgatctcggctcaccaccacctccgcctcccgggttcaggtgattctcctgcctcagcctcctgagtagctgggattacaatcacccaccaccatgcccggctaattttgcatttttagtagagatggggtggtgggggggcagggggtgtttctccatgttggtcaggctggtctggaactcccgaactcagatgatccgcccgcctcggtctcccaaagtgctgcgattacaggtgtgagccaccgctcccggccctactttctgttttttaactggattactgagtccatttacagataaagccgagaaagcacgtggagtttccaggactggcctaagcctcacctatagaaaaagcaggcacagctggaaggcagagctcttggatcccagaaatcacggatcccattcctaggctgaatccctgatcccctagaccagtggcaaagcccaagagggaaatgcccagggacaggctgttaaaagctcccacactcagcctgggctgcaaggcacactttactgtcagttctgcttggctcagtcagaaatctgagttttttcttatctcaatgcatgaagaaatgaggaggataaaatttgcccactgtggtaataaccattcattccaaccttgtcagttatcttcaaaattgtagctattgacagtaactacttagttatcccatgaccaaaggtcaagtgttttcttaccttagaaagtaaccctcctgggcccggtgtggtggctcacgtctgtaatcccagcactttgggagaccaaggcgggtggatcacctgaggtcgggagttcagaaccagcctgaccaacatggagaaaccccgtctctactaaaaatacaaaattagccgggcgtggtggcacatgcctgtaatcctaactactcggtgggctgaggcaggagaatcgcttgaacccgggaggcggaggttgtagtgagccgagattgtgccattgcactccagcctgggcaacaagagcaagactctctctcaaaaaaaaagagaagaaagtaacccttggaccttcaaaagccaaagagatcagggagtttagtgcaaaagagagcagaggattagaccccaccctcgactcttggggctccgtgaggaagacagaagaccccaaaaaggaagtctgtggtgctttggctgagctcctcaaggaggctcagaatcactaaaagtctcttttttattttatatatattttttattattatactttaagttctagggtacatgtgcacaacgtgcaggtttgttacatatgcatacatgtgccatgttggtgtgctgcacccattaactcgtctcttttaaatctcttcatgtgctattgaaggagacaaaaggaagaaagagtggaggtagatggggaaacaagtcttttttttctttttttgagacaaggtcttgctctgtcgctcaggctggagtgcagtgccaccatcgtgactcactgcagcctctatctcctgggctcaagtgatcttcccacctcagcctccaaagtagctgggaccacaggcatacaccaccatgcccggctattttccacatttttagaaggcttggcgtggtggctcatgcctgtaatcccagcactttgggaggccaggacaggtggatcacctgagatcagcctgaccaacttggtgaaacccccgtctctactaaaaatgcaaaaattagccgggcgtggtggcgcacgcctgtaatcccagctactcgggaggctgaggcaggagaatcgctagaacctgggtggcagaggttgcagtgagccgagattgtgccattgtactccagcctgggcaacaagagggaaactctgtcttggaataaataaataaataaaaataaatamaataataataaataaaattttggcagagatggctcttgctgtgttgtccagggtgctcttgaactcctggcctcaagcgatccttcagcctcagcctcycacagtgctgggattacaggcatgagtcaccacactcggcccatcaatttattttrtaagcaaactggttcacatacgttttttcccgttaatccagttttggaaagggaaaaaaaccaagacttttaccacctttactggaccgggtcccacaggcagagatccaaggagctggtaagaaatctcacctttttctgccagctatttatcatttgtcccagaaaaccatctgtaggctccgaaacaagagtgatttgatttgcatcctgctcacagtgccagaactgcggggaagttaaaatgtttcccctggaggttaaaacatttgagtctatataaatcaaactaataatagccagrtagcaggagaaaggaatacacattttatcatgtgcacacaggactcacagaaaatacgcaaactcagagaaagggccagatagctgaagttgttttttgagacagagtttcactcttgttccccaggctggagtgcaatggtgcgatctcggctcaccacaacccctgcctcccgggttcaagcgattctccctcctcagcctcctgaatagctgagattacaggcatgcgccaccatgcccggctaattttgtatttttagtagagatgggatttctccatgttggtcaggctggtttcgaactgccgacctcaagtgatccgcccgcctcagcctcccaaagtgctgggattacaggcgtgagccaccgtgcctggctgagccaccgtgcccgacgaagtttttatatcactctgaggttaaagaagaatcaggacttggagactggtgagacaggttatggaagagagagaagaaaggcctggctacggagggctgtcttttaatgcagatgaaaccctgatgggtaggggctctcagaaagaataaactttcttttctttttatttgagatggagtttccctcctgttgcccaagctgaagtacagtggcatgatttcagctcactgcagccacccctcctgagttcaagcgattctcctgcttcaccctcccaagcagctggtattacaggcgcatgccaccaagctcggttacttttttgtatttttagtggaagacagtttcaccacgttagccaggctggtcttgaactcctgacctcaggtgatccgcctgcctcggcctcccaaagtgctgggattacaggcatgagccaccgtgccaggcctttaaaaacattttttttgagaccgagtcttgccctgtcacccaggctggagtgcagtggtgcgatctcagctcactgcaacctctgcctcctgggctcaagtgattctcattcctcagccttctgaatagatgggattacagatgtgcaccaccatgcccagctaatttttgcattttttgtaggcacagggttttactatgttgcccaggctgctctcgaacttcagccctcacatgattcacctgcctcggcctcccaaagtgctgkgattataggcgtgagccacctcaccccgcccgtccagaaagagtaaatttctttcttttttctttttcttttttttttttttttttttgagacaagtctcgctctgtagcccaggctggagtgcaagtggctcgatcttggctcactgcaagctctacctcccgggttcacaccattcttctgcctaagcctcctgagtaggtgggactacaggcgcccaccaccacgcctggctactttttgtagttttagtagagacggggtttcaccatgttagccaggatggtctcgatctcctgacttcataatctgcccacctcggcctcccaaagtgctgggattacaggcatgagccactgtgcccggcctacaattttttttctttttgagacggagtctcgctctgtcgcccaggctggagtgcagtggcgtgatctcagctcactgaaagctctgcctcccgggttcacgccattctcctgcctcagcctcccgagtagctgggactacaggtgcccgccaccatgcccagctaatttaaaaaaattttttttaaatttttagtagagatgggggtttcaccatgttagccacgacggtctcgatctcttgacctcatgatccgcccacctcagcctcccaaagtgctgggtgggattataggcgtgagccaccgtgcccggcctttttttcgttttgttttttgagatggagtctcaccctgtcacccaggctggagtgcaatggcacgatattggctcagtgcaacctctgcctcccaggttcaagcaattctgcttcagcctcccgagtagctgggattacaggcacagccaccatgcccggctaattttttgtatctagtagagacaggatttcaccagggttggccaggctgttctcaaactcctgacctcatgatcagcccgccaccctctcaaagtgctgggattacaggtgtgagccactgcacctaatctaatcttttataactgtcaatctaatcttataactgtatgttagcctttgtatgcaaaatgctgtcattctgctcacgatctccattttttgttgttgttgttgttggttttttgtttgttttgtttgtttgtttgttttagacagagtcttgctcttttgcccaggctggagtgcagtggtgcgatctcggaacactgaaacctccaccccacccygcctctgcctcccaggttcaagcaattcttctgcctcagcctcccaggtagctgagattacaggtgctcaccaccacacagccagctaatttttgtatttttttttttttagtagagacagggcttcactatgttgaccaggctggtctcaaactcgtgacctcaaacgatctacctgccttggcctcccaaagtgctgggattacaggcattagccactgcgtttgacctctccatttttacctgtataaatgagttccacttttccccatactggaagcactgatcaccattcttcggtgtccttgtgtccctggacagccaccctcacacacttgtgtttaaaaaaacttttcttatttttttcttgagatggagtctcgttctgtcacccaggctggagtgcagtggcgtgatctcagctcactgcaacctccacctcccaggttcaagcaattctcatgcctcagcttcccgagtagctgggactacaggtgtgcaccaccacacccaggtaatttttgtatttttagtagagactgggttacagcatgttagccaggctggtctcgaactcccggtctcaagcaatctgcctgcctcagcttcccaaagtgctgagattacaggcgtgaacaactgtgcccagatttattttttaatttttcagaggcagggtctttctctgtcactcaggctggagtgcagcgtcaggatcatagctgacgctggacctcctgggctcctcttgcctcagcctctcaagtagctgggactacagacatgtgccaccatgtctggctaattttctttattttttgtagagagacaaggtcttgctatgttgcccaggctggtctttaacttctggcttcaagctatgctcctgcctcagcctcctgagtagctgagattacaggtgcatgcctccatgcctggccaccacggccaatttcaagctaccaatatgagatcattgaacatgcaattggaaagaaatgcacagtattacattgttctatagcaagcctattacacagacataataaatgtaaataggccaggcaagatggttcatacctgtaatcccagcactttgggaggctgaggcaggaggatcgctttgagctcaggagttcgaggccagcctgggtaacatagtgagaccccatctctacaaaaaaacacaaaattaactgagtgtggtgacgggcacctgtagtcccagctactcaggaggccaaggcaggagactcatttgagcccaggaggcggaggttgcagtgagcacatacattgattggcacacagattggcagatactaacatacagtgtgtttttttctccagagaactggctggtaagtgtttaccatagtaagaagacttactatagaacaatgtattactgtgcgtttctttccaattccatgttcaatgatctcttattggtagcttgaaattggccgtggtggccaagcatgggggcgtgcaccagtaagggaaagctgaaatggaaaacagagggtttagggcaacagtcctgaattccggagtgctgtccccctgggggagttatgggaatctgtgggggttgtttttagttgtcacagtggaggtcctaggatgctaccacagcgtttacgcggctggggtcagcgacaataaaagttacgcaatgaaggtttgtcctgcattctcaggactttgttttatttttgagacagagtcttgctctgtcacccaggctggagtgcagtggtaccatctcggctcactgcaacctctgcctcccaggttcaaggaattctcctcccctagcctcctgagtagctgggattacaggcgtgcaccaccatgcccagctaattttgtatttttagtagagatggagtttcactaaaaaaaaatgttggctaggctggtctcaaactcctgacctcaggtgatcctcctgcctcggcctcccaaagtgctgggattgcaggcatgagccactgcgcccaggtcattcccatgactttggaacatctgtgggacattcatggagttggaaagtctaagcctctgagccccaaatctgttttgcgttttttttttttttttttttttgagagggagtcttgctctgtcgcccaggctggagtgcagtggtgtgacctcggctcactgcaagctccgcccccggggttcacgccattctcctgcctcagcctcccaagtagctgggactacaggcacccaccaccacgcccggctaattttttttwtatatatatttttagtagagacggggtttcactgtattagccaggatggtctcaatctcctgacctcgtgatccgcccgactcagcctcccaaagtgctgggattacaggcgtgagccaccacacctggcctgttttgcatattttatgacagctcacctccccacttccccgccccaccctgtttcttttttccttgtcgctgaatcacagggaaacaggtcgtttgtcctgtggacgggctcacattctggactgggctgattgctgcctcatggtgtcgtttcactgggaactttgtcctcctgttttctgcaaactggtggttagagtgggaagcttgatctgatttttttgtttgtttgtttgaagggagctccgtagctggtaggtagcctcctgctgcttagctgaagctggggagtggctgctggtttctctttcctcctgttaggactgctgggagctctggtggtgcctgcctcttctctcagtaaaattcctcatccatcttttttttttttgagacagagttttgctcttgtttcccaggctggagtgcaatggtgtaatctcagtttactgcaacctccgcctcccaagttcaagcgattctcctgcctcagcctcccaagtagctgggattacaggtgcaygccaccacgccccactgatttttgcatttttagtagagacagggtttcaccatgttggccagactggtctcaaactcctgacctcaggtgatccacctgcctcggcctcccaaagtgctgggattacaggcatgagccactgtgctgggccatggctaatttctgtattcttataaggacggggtttcaccttgttggccaggctggtctctgactcctgacctcagttgatccgcctgcctcggcctcccaaagtgctagaattacaggtgtgagtcaccacaccgggcccatttgtatttaaaaatttttttgaaataggcagggcgaggtggctcacgtctgtaatcccagcactttgggaagctgaggcaggagaatcccttgaacttgtgaggcggcggttgcagtgagctgagatcacgccattgcactccagcctgggcaacaagagcaaaactctctcaaaaagtaatactactaataattaattaataaataaatataagactctgaggggactcagagtcagcgagagcctggcctagcaggactctgtcccccgcctccatgctgccttcctggaggccttcctggctgcctggaggagcggagcagagtgggggcccctttctgttggggcatcacaacagttccccaaggaagacccycggggacccggatgggggatgcgaccttgtcctgcctctctcccccacccttatggccaggcttggggtgcctggtgcaggtggaggagctaagggtagataacaagatggactktgtggccggcaatggggagggaggaggggctacgggctcacctccctcccgcagcccagccacacctgctctggaaagccctgtagctcctgggcggggtttgccagtcaccgatgctggaagggtttctttggccctgagtgaagagagacccagagggaacactgaggtgcctgcccaaccactctgtcccggtttccttcagcaggaccaggtgagagaaggtgagggggctcctctcccaccctacaacacgcacacctctgcacacacgcccaggcggagagcagggatttgggacgtggacctgygtgccctcgtgggtccctggtgccctctgggaggcacccccaactcaggacctccaggagaggagggtccctccctcggcagccaggacccccctccccagccagccgccctccttagctccctccccacttccttccaggtggatctgtttctagagctccaaccaccagctccctccccttctccaccccgggccaccaggtccttccttgtctccttcccctcagcagtttctatgaaccaccctggcagtaatggtgcagatggctcgcgcacagctggtggtgacccgactttcctgcctccaccctggggctcctcagaggcttcatggaacccaaactgctggtctcacctccgagccctgccstcgcccagggagggcggctccgtccctcctgcactccctaatcccgctctgaatcaccgcttctgttctgggtcggagaataaaggtggggtttccaagtgatggccctamgttattgtctgaagctcccttctcctccccagggtggaagtgataatgccgggaatccgggaatcccggggaggtgcaggaagacagcgagctcgaggcagtggggtgcgactgagccggatgtgctgagctgcccggggcacggggcggttggggtagagaaaggctttcagagctgggggacaggacggggccccgggtgagcggagagctgggttatttcacgggaacagctggtgacaaagccggaggggtgtgcggggccggcgagagactgggattgtgtcttaagaggcatagggagccctgaaggggctgcgagctgggaaggggcagggccggcgctgggtgtaggggacagaggggagaggaggaagccgggccgcaatagaaagacgtggacggggctggacgtggtggctgacgcctgtaatcccagcactttgggaggccgagacaggcggatcacttgaggtcaggagttcragaccagtctggccaacatggagaaaccccgtctctactaaaaatacaaaattagccaggcgtggtggtgcatgcctgtaatcccagctactcgggaggctgaggcaggagaatcgtttgaacccgggaggcggaggttgtggtgagccgagattgtgccattgcactccagcctggggaacaagagcaaaactccgtctcaaaaaaaaaaaaaaaaaaaaaaaatctcagtaagatagaccaggtgtggtgtctcatgcctgtaatcccagcactttgggaggctgaggaaggagaacagaggacctcctgaggccaggagtttgagatcagtgtgggccacatagcaagaccccctccccaccatccctacaaaaaaagcaattcaaaaaaaataatgccttcaggcagaatgggagtggtgcttggttcaagcctgacataagtgtgagtttggggcacaaattctgctctgaataccagggacagcccatgtaatacagcatttccctttgtgcccacgcagccctaagggaggtgtggtttgttgttgttgttgtatctttttgagatggatttttgctcttgttgcccaggctggcatgcaatggtacaatctcggctcactgcaacctccgcctcccaggttcaagcgattctccttcctcagcctcccaagtagctgagattacagtcatgagccaccatgcctggctaattttttgtatttagtagaaatggggtttcaccatattagtcaggctggtctcgaactcctgacctcaggtgatccacccgcctcagcctaccaaagtgytgggattacaggcatgagccactgcactggctcttttttttttttttttttttttttgagacggagtctcactgtgttgtgcaggctggagtgcaatggtgtgatctcagctcactgaaacctctggggaggtgttgtttttatccctccccacaaccccctgttgatggacagacaaggacaatgaaacacagagaggtaaaagccctgggttaaagtcacacagcacataaaaggttcctgatcatgccgtgcagggcatctcgccaaacctcaaaaattcacaatctcatagcgcagcttgctctgtgaggcctccccacctcttccttctctccttccaggctccagtcaaggtcagtgcccagcttcctgctctgggccactcagcagccaccttcctccttcctgggtaaggaggtagggagctaccaaggaggcagggacatccgtgtagaacattctgcttttcttttttctttttttttaagatagagcctgactctgtcgcccaggctggagtgcagctgtagtgtaatggcacaatcgcagctcaccacaacctccatctcccaggttcaagtggttctcctgcctcagcctcctgagtagctgtgattacaggcatgtgccaccacgcctggctaatttttgtatttttagtagcgacggggtttctccatgttggtcaggctgctttcaaactcctgacctcaggtgatccgcccccgcttggcctcccaaagtgctggaattacaggcgtgagccactgcgcctggcctaattttctctaaaatagagacaagttctcactatgtggtccaggctgatctcgaactcctgaactcaagcaatcctcccagctcagcctcccaaagtgctagcattacatgtgtgagccatcatgcctggtccctgtctgtttcattctccctgtctctctagtcctgcctctctctgtgtcttctggtctttttctctatttgtctcttcctctgtcccttttatcatctctgtcccttccctccctccctccctcccttccttccttccttccttccataggtgagaaaaagtagcatcttttcctcacctatcacaaagtttgcagctggggcacctacagtaaaaggttaacagacacaagcataacaaatgtatttaaggcaagtgttgacatgggagccttcagaaatgaaggcctaaagaaacagggaaacctgggtgggttttttgttttgttttgtttttagatggagttttactctgtcgcccaggctggagtgcagtggcgcgatcttagcttactgactgcaatctctgccttccatgatcaagtgattctcctgcctcaacctccccagtagctgggattacaggtgcgcgccaccatgcccagctaatttttgtatttttagtagagaaggggtttcactatgttggccagactggtctcgaactgctgacctcaggtgatccacccactttggcttctggaagttctggcattacaggcgtgagccactgtgcccggctacctcccgttctatgakctatggtttaaacgctacatttgaccactatcaatactcccagtatcaaaactgggaaacctgggttcttcacccagagcctaaaacgaacagcattctttgccttgtgggtgacaatagcaaacatttaccgcctgtgtatatgtgccagacactgttttaatcctcagagaggtgatgtcacttgcccaaaatcacacagctcgtgactgtgagtctgaaattggccagagcttgtgcacctagccactggtggtgatgtgtctttgagtcatcgagtccagcattctgtgttggacttagtgaaaggatatacttttgtagtgatgagaaaggagctttatctagaatttgtgaggccaggcatggtggctcacgcctgtaatcccagcactttgggaggctgaggtgggtggatcacttgaggtcaggagtttgagaccagcctggtcaacatggtaaaaccccgtccgactaaaaatacaaaaattagccaggtgtggtggtgcacacctgtaatcccagctactcaggaggctgaggcaagagaattgcttgaacccaggaggcggaggttgcagtaagccaagatggcgccactgcactccagcctgggtgacagagcaagactccatctcaaaaaaaaaaaaaaaaaaaaaagaaaaggaaaagaagtgaactggttcaaagaccataatcatacatatcacacaagactgcaagcggaccagggtcagttaatttagcggctccacaaagtcatcagtcacctgagctccatccatcttcacatgctgtgctaccatttattttattttatttttttttttgagacggagtctcgctctgtctcccaggctggagtgcagtggcgcgatctcggctcaccgcaagttgcgcctcccaggttcatgccattctcctgcctcaacctcctgagtagctgggactataggcgcccaccaccacacccggctaatttttttatatatatttttagtagagacggggtttcaccgtgttagccaggatggtctcgatctcctgacctcatgatccgcccgccttggcctcccaaagtgctgggattacaggcgtgagccaccgcgcccagccagctaccatttcttagctgtatcatctcacggtcccaaaagggctgctacacatccagccatcacatgcagataatttctttcaaaaacagcagaaagaggctcgttcttgtcttggtcccttttgaagaatgaatgaaaccttcctaagccttccagcaactccccccacaactccgatgggtaggaattgtcacataaccatgtggcccgataggaggcaaaagaaatgagacttctgggattagtttagcctcagattctgcagctgagaagttgatcagccacctctgaaggacaagcagcttgcagaaaattagggtggtgttaccaaggagaaaaggggaaatggctttagagtagacaacagggatgccctgaggggttgtgtaggttgttcactgcacgaagtcccctggtcaagaaggtaagcggggtttaaacagacccacagtctactcatcaaaccaggtgtccttggcattgtgtccacccagagagctcactattttcttttcttttcttttctttttttgaaatggagtcttgctgtgtcccccaggctggagtgcagtggcatgatcttggctcactgcagcctccgcctcccgggttcaagcaattctcctgcctcagcctcccgagttcaagcaattctcctgcctcagcctcccgagtagctgggattacgggcgtccgccaccacacctggctaatttttgtatttttagtagagacagggccttgtcatgttggccaggttggtctccagctcctgacctcagctaatctgcccacctcggcctcccaaagtgctgggattacaggcgtgagccaccgcgcccggccacaactcatcttttagagccagcctacacttgtcataggccatggccgatgaatgggaagtccacggtggagctgggtgttcctctcaagttcaactggctgcggccaggagggcaggcaggccaggtggacaatttcccttcaaagtggatacaggcaggacatgcaaagatgaatatctctggcactggactctggcaagtaggaaaataaaaacaaaagatgaacatcttgggccgggcgcggtggctcacatctgtaatcccagcactttgcgaggctgaggcagaaagatcacgaggtcaggagttcgagactagcctgaccaacatggtgaaaccccgtctctactaaaaatacaaaagttagccaggcgtggtggcgggcgcctgtaatcccagctactcaggaggctgagacaggagtatagcttgaacctgggaggcagaggttgcagtgagcagagatcgtgccattgcactccagcctgggtgacagagattccatttcaaaaaaaaagaacatctctacaaactggatcaccagtaaataatagctacatatacttgtactcaccatatgtggacacccacatatgtacactcagtcgataaacacccacatttaaacataccatgtgggccaggtgcagtggctcacgcctataatctgagcactttgggaggccaaggtgggaagatcacttgggcctaggagtttgagaccagcctgaccaacatactgagaccttatctctacaaaagagaatttgtttttagttagctgggcgtggtgatgtgcacctgtagtcccaactactcgggaggctaaggcaggaggattgcttgagcctaggaggtcaaggctacagtgagccacgttctcaccactgcactccagcccaggtggcagagcaagatcctgtctcaaaaaataaataaaaaattaataaacaaaaaatgcatacaatgtatagatacacaaagtgtatatatatacatatatatgtatacacattcacatatacacacatgctgtgttcacaatcacctagatgacatatgtatgtgtatacatacttacacatatacccttacatgtacacgatatatctctacccatacactaccatgtacacatgtccatttgtacacagctgtatatgtacacacacaattttgcacacacctgtatatgtatacaatgtatggatccccatatccacattacacacaatgtgtacgcatctacctgtgtacacacacccacstatgaacacaatgtagacacatctgtataaacacacttgagatacatgcctgtgcacataggcaagtatgtgccaagtatttacacacctgaagtagaagcasacacacacccacactatgcctgcacaccaccgcatgsccacgttcaccagygccccgggcctcyatctcccagctaacgtgtcccgttttcctcccctgacagccatgctggtcgttcagatgcctttctcctttcccatggcccacttcatcctctttgtctttacggtttccactrtatttcacgttcagcagcggctagcgaagattcaagccatgtgggagttaccggtgcagataccagtgctagcctcaacatcaaaggcactgggacccagccagctcagggggatgtggacgatcaatgcrataggccgcctggggaaccagatgggcgagtacgccacactgtaygccctggccaagatgaacgggcggcccgccttcatcccggcccagatgcacagcaccctggcccccatcttcagaatcaccctgccggtgctgcacagygccacggccagcaggatcccctggcagaactaccacctgaaygactggatggaggaggartacygccacwtcccgggggagtacgtccgcttcaccggctacccctgctcctrraccttctaccaccacctccgccaggagatcctccaggagttcaccctgcayraccacgtgcgggaggaggcccagaagttcctgcggggcctgcaggtgaacgggagccggccgggcacctttgtaggkgtccatgttcgcygaggggactatgtccatgtcatgccaaaagtgtggaagggggtggtggccgaccggygatacctacagcaggccctggactggttcygagctcgctacagctccctcatcttcgtggtcaccagtaatggcatggcctggtgtcgggagaacattgacacctcccacrgtgatgtggtgtttgctggcgatggcattgagggctcacctgccaaagattttgctctactcacacagtgtaaccacaccatcatgaccattgggacgttcgggatctgrgccgcatacctcacgggcggagacaccatctacctggccaattacaccctccccgactcccctttcctcaaaatctttaagccagaggcagccttcctgccggagtggacrgggattgccgcagacctgtcccccttactcaagcactaatgctggcccrtyctttgagaccttttctccttctctgcctccctcaagatgagtgcccgggcatgagaagcacatggttccatgagcaggacccatctctcttctgtgaagatgcgttgggctgcaagtaacagaaatctcagtgaacagtggcctggcgtggtggctcatgcctgtaatgctcgcactttgkgaggccagggtgggtggatcacttgaggtcaggagttcaagactagcctggccaacatggtgaaaccccatctcgactaaaaatacaaaaattagccaggcgtggtggtgcacacytgtaatcccagctactcgggaggctgaggcaagagaatcacttgaacccaggaggcggaggttgcagtgagccaagatggtgccgctgcactccagyctgggtgacacagcaagactccatctcaaaaaaaaaaaaaaaaaaargaaaagaaaaagaaatgaaygggttcaaagaccataatcatgcatatcacataagaccagaagtggcccaggtccagggtcagttaatttagcrgctccacaaagtcatcagtcacctgagctccatccatcttcacatgctgtgctaccatttcttagctgtatcatcccatggtcccaaaagggctgctacacatccagccatcacatgcagataattcctttcaaaaacagcagaaagaggctcgttcttgtcttggtcccttttgaagaatgaatgaaaccttcctaagccttccagcaatttccccccaactccgatgggtaggaattgtcacatacccatgtgacccrataggaggcaaaagaaatgagacttctgggattagtttagcctcagattctgcagctgagaagttgatcagccacctctgaaggacatgcagcttgcagaaaattagggtggtgttaccaaggtgaaaaggggaaatggctttagagtagacaacagagatgccctgaggggttgtgtaggttgttcactgcaggaagtcccctggttaagaaggcaagtggggtttaaacagacccacagtctactcatcaaaccaggtgtccttggcattgtgtccacccagagagctcactgttttcttttctttttcttttytttttttttttttttttgagatggagtcttgctgcatcccccaggctggagtgcagtggcatgatcttggctcactgcagcctccgcctcccaggttcaagcgattctcctgcctcagcctcccgagtagctrggattacaggtgcgtgccaccacgcccagctaatttttatacgtttagtggaaatggagtttyaccatgttggtcaggctggtctcaaactcctgacctcatgatccgccttcctcggcctcccaaactgctgggattacaggtgttagccactgcgcccggccctagagctcactgttttctagttagtccatctggaagtggagcctttttccagtttgcacaaatgtgccatattggcttgtagctggcatgcatccaagtccataggtcctgcctcttcaatcctggctttctagggcctgggatgatcattgctagaactgagagaccagcctggctcagtgaacttcagggcgttccrttcattctttcagtaaatgtttgcagcacatgtgttacatgtcaggcagtgaaaccccccacagcagccttccctctcagaggatacatttgtaaccattacacagtcatcaraggaataattttttttaatcaccagtgtgcayacagtcatggagttgggtattcccagctaccagggaggctgaggtgggaggattgcttgatgccaggagttagggaatatagtgcaccgtgattggacttgcgaatagccactgcactgcggcctggacgacgtagtgataccctgactcttataaataaataaatgaataaacacaattatgactttgcggatgggagaaaaggttctctgagarcgtattacataagtatcacatgaactccaaaatacatcttaggccaggcatggtggctgtaatcccagcactttgggagggtaaggcgggcrgatcacytgaggtcaggagtycgagactagcctgggcaacatagtgaaaccctgtctctactaaacatacaaaacattagccaggggtggtggtgcagacctgtagtcccagctacttggcaggcttaagcaggagaatcgtttgcaccagggaggcagaggttgcagtgagccaggatcacaccattgcactctagcctggacaacagagtgagactccatctcaaaaaaaaaaaaaaaattcttaagagtagatggaatcctattacaagtctggatcaaaaaggcagctttggctgggtgcagtggctcacacctgtaatcccagcactttgggaagctgaggcagatggatcacttgaggttaggagttcaagaccagcctggccaacatagtgaaaccctgtctctactaaaaatacaaaattagctaggcgtggtggtgcatgcctgtaatcccagctgctagggaggctgagacagaagaatcgcttgaacctgggagatggaggttgcagtgagctgagatcacaccattgcactgcagcctgggcaacaagagcgaaacttggtcaaaaaaaagaacaaggcaacttttacaacgattttttagatctcaatattacagtattttctccagactacccacaaatacatactgtgcacctatcatgtatcagaaagcaatctaggagatacgatccctgctctcaagacggcattaacaaatcacttcaaaatataattggtacaggccaggtgcagtggctcacgcctgtaatcccaacactttgggaggccaaggtggcagggtcacttgagagcaagagttcaagaccagcttgggcaacatagggagatcctgtctctacaaaaaataaaaaactaactgggtatagtggaatacaactgtaggaccagctactcggaaggctgaagtgggaggatcaattgagcccaggagtttggggcttcagtgagccacaatcacacctgtgcatagccactgcattccaaagtcgcaacatagcaagacaccatcactaacaaaatttttaaaaatcgaaaagatacaggccaggcgtggtggctcacgcctgtaatcccagcactttgggaggccgaggcaggtggatcacaaagtcaagagatcaagaccatcctggccaacatggtgaaaccctgcctctactaaaaatacaaaaattagctgctgtggtggcacgcacctgtagtcccagctactcgggaggctgaggcaggagaactgcttgaatccgggaggtggaggttgcagtgagccgagattgtgccactgcactccagcctgccagtagcgcgagactccgtctaaaaaaaaaaaagataattgaaaagatacaattagatcctgaggcaagcaggtgctatggctcacatctgtaatcccagcactttgggaggccaaggtgggtggatcacttcagatcaggagtttgagaccagcctggctgacatggtgaaactctgtctgtgctaaaaatacaaaaattagccaggcgtggtggtgcacacctgtaatcccagctactcgggaggctgagtcagtagaatcacttgaacccaggaggtgaagtttgcaatgaactgacatatcgccactgtactccagcctgggcaaaagagcgaaactcaagagagagagagagagaaaagagagaaagaaaagagaaagaaagaaaagaaagaaacaaagaaggaaggaaggaaggaaagaaagaaagaaagacaaagaaagaaaggaaagaaagaaagaaagaaagaaagaaagaaagaaagaaagaaagaaagaaagaaagaaaagaaagaaagaaaggaaggaagaaagaaagaaaaaagaaagaaagaaggggaggggaggggaaggaggccaggtgtggtgactcacgcctgtaatcccagcactgtgggaggccaagaccagtggattacctaaggttgggagttcaagaccagcctgaccaacgtggagaaaccctgtctctactaaaaatacaaaattagccaagtgtagtggcgcatgcctgtaatcccagctactcaggaggctgaggcaggagaatcgcttgaacccaggaggcagaggttgcggtgagccgagatcatgccattgcactccagcctgggcaacaagagtgaactccatcaaaaaaaaaagaagaagaaggaaagaaggaaaaagagaggaaggaggaggagaaatattttttccagtctacacaatgaacatgactatatccttttggggagggagtacgtttataatataaattagtaatttttggtattttgatgttggtggtctttttcaggcctcatgatgtaaatatccaccttctgttgagatcagaggaaagaaggaaggtgctgcttggggttccccatctgatcccccttggtccagccctggttttcctgaggcaggagggagggatgaagtctttggagaagagttgggtgttgggcgctcggcagtgccggcagtgcaggaggcaagcctttcagttaggctgaaggttcagacaggcaccccaccaagccggcttcctggccctgactccttggggcagtgcagggaccacgtgcaccctcagctcaacagagcccactctggatgcaggcgagatgcggaaggtgcaatggaggcaggtggggggcctggcagaagctgaaagacgagtgcccgagacacagagagatgagcgcagagactgacagggatgacggatgcagcagggataaagggcaggagggagttggagacagagatagggaggagagaacagccagagggcaaatcagacagagaacagagaagagatatgaagacagaaccaggacagagtgacctgagtcaggcagagatggggacacattgatatggagagtgatacagtcagaaaagtctctgggccaggtgtggtggctcacgcctgtaatccctgcactttgggaggctgaggtgggaggagcacttggggtcaggagttcaagaccagcctgagcaacatagtgaaaccctgtctctataaaaaaatgcagaaatggctgggcatggtggtgcacacctgtaatcccagtactttgggaggctgagactggagtgcagcggcgtgatgtcggctgaccacaacctccgcctcccggattcaagtgattctcctgcctcagcctcccgagtagctgggattacaggcatgcaccaccacacccggctaattttgtatttttagtagaggcggggtttctccatgttggtcaggctggtctcgaactcccaacctcaggtgatccgcccgcctcggcctcccaaagtgctgggattacaggcatgagtcactgcgcccagcctggtctactgttcttttccacctgcagtggacagtgctggtggcgcacccaggtgccttcagattcctcttgccagttctgtgcacccagcccccagcttgtgtgcttggtgtattaatcatgcctttgtattttctgaacttctgctgctttgacaagtgcgggcctcgatgactctggagggactgaccctcccagggatagccaaatgctagagatagttaactactcacctttcctatgtaaaccagccaatccagagcccacaccccatccacacctttatgagcacaggctccctgagccaggcaccaaaaactcaggacagcctctatgctccagagcctgctgaaattcaaactaggtaatctcaaacccacttaccttgcctcttctggtcttttttgttttgttttgtttatttttattattatttctttgagacagagtctcactctttcgcccaggctggagtgcagtggcgtgatctcggctcactgcaagctccacctcctgggttcaggccattctcctgcctcagcctccccagtagctgggactacaggcgcccaccactgcgcctggctaattttttgtatttttagtagaaacggggtttcaccgtggtcttgatctccggacctcgtgatccacctgcctcggactcccaaagtgctgggactacttttgtttttttaagatggagtctcactgtgttgcccaggctggagtgcaggcatgatctcatctcactgcaagtgattctcctgcctcagcctcccgagtagctggaactacaggtgtgcaccaccacacctggctaattattttttttttttgtatttttagtagatatggggttttagcacattggccaggctggtctcgaacttctgacctcaggtgatccacccgcctcggcctcccaaagtgccaggattacaggcgtgaatcactgggcccaatctttttttttttttttttttttgaaacacaggatcttgatctgttgcccaggctggagtgcactggtgcaatcatagctcactgcaacctcaaacttcaaagctcaagtgatcctcctgcctcagcctccagagtagctgggactacaggtatgaaccacggtgtttggccctgaaacctattttttttttttttttttgagatggagtctcactctgtcacccaggctggagtgcagtggcgcgatcttggctcactgcaacctccacctcccagattcaagcaattctcctgcctcagcctcctgagtagctgggattaaaggcgcatgcccagctaatttttgtatttttactggagactgggtttcaccatattggtcaggctagtctcaaactcctgacctcatgatccacccgcctcggcctcccaaagtgctggcattacaggcatgagccaccgcgcccggccaaaacctacattttaaaacattttgctgctaacaacttaccctatgacgttcttcccaggactgcccttgggctggaggttcctgggagtttatgtcattcctccctccctctgtgacccatggctcatggctgactaggggtggtatagtggcaagtctccagatgtagcccctagtgagcatgtccctgatattcacagatttgtatagtgccctcccgtatttaacgtgggcttgcctgacttgcattaattataaaatacagtggaagagaaattgtgccagtttcaagcctagtctttaagagactggtagcttctgctcctggctcttggaatactcactcttgggagccctgagctatcatgcaagaaatctagttatcccgggggagaggccacagaggaatagtgctgacactgcatggagtgtcacactgcacaacccagctgggcccagccttcatgctatccccaccacggtgccacacacatctgatgtgccatcttgtatgtgctagcccaggtgggccctgagatgactgcagctctagccaacatcacatggaactgaagaactgccctgctgagcccagtcaacccacgcatttgtgagcagtcatagatagttattgttttacaactctaagttttggggtggtgtgggtttttgttgtttgtttgtttgtttgtttgtttgttttgagatggagtagcactctgttgcccaggctggagtgaagtggcatgatctcagctcactgcagcctccacctcctggtttcaagtgattctcctgcctcggtctctcacgtagctgggattacaggctcccaccaccatacctggctagtttttttttttttttttttttttttgagacggagtctcgctctgttgcccaggctggagtgtggtggcacaatctcagatcactgcaagctccgcctcccgggttcacgccattctcctgcctcagcctcccgagtagctgggactacaggcacatgccaccatgcccagctaatttttttgtatttttagtagagacagggtttcaccgtgttagccaggatggtctcaatctcctgacctcgtgatccgcccaccttggcctcccaaagtgctgggattacaggtgtgagccactgtgcccggcccagtttttatgtatttttagtagagatgggtttcaccatgttggccaggctggtcttgaattcttggcctcaagtgatctgcctgcctcagcttcccaaagtgctgggattacag

SEQ ID NO: 94451 - DNA, 34905 bp, Homo sapiens
  misc_feature (1)...(34905): n = A,T,C or G
ctgggaccacacagaagccaagggacagagagaagctttcgtgcccagatctgggtggagaaagaagtgagagagggggtgagtggggcacagcaggggccctggcagctcgctcgccacctcctgcacttggaggtcccactggcctgcctgttctgtcccagtttcagtccattctagacggggcaggtggtcctgaaggaggccaagtcccctccctgccctgacgagggctcgctggaaagagctgagtcagctcccgccccctcctccatgctgcggcaaagtcaaacgcaagcgcctcccaccccagagacctttggtcgcagcctggaaatcagctcagacaagaaaacaaccagggaaggcacacaggtaagtgaaggcctccgggtacccaagtgctgacaggccttagaagaccaaggaccgacaggtcctgctcccccagagctcaggggtgcagaccccaggcccgcctccctcagacctaagtaagagtccagactctagctgcctcctccctcagacccgaagtctgggcccccagcccctcctccctcagaccctggagtccaggcctcagaccctcctcccttacatccaggagtacaggccccacccctcctccctcagacccaggagtccagttccccagcccctcctccgccagacccaggagtacaggtgcttattctctgaaggtattcgatcaactgggctctgattacctgaaatacaaacccattttggcagtgactccaattcccttcagcccctggggctgaggggcagctacaggggcctggggagccactgcagtcctcactgcatgaggctcaggcgggtcctcccagaggggagtaggaagagcaggtctggctgtgtccagcaggctgggccctctctggtgacctttgacctcacaaggcctctttccccagccctgtggggaggcgttggggcgtgaggttgagagagacagagtggcctggcctggcctgccctgtgagctgggtgagttggcactgattctggaagatggacgtgaatgggcgtggtcacttgtcgctaggtgagttgctgggagatgggcctgcagcgtggtcttgctggtgtgaggctccagggattccggggtgatcagagcgtgggtccccagattgcctttgggtggcgacatctagactgctcagccttgcagccatgcttctgcccagagggataggacacccacagtatgagagacacaaacacagtgcgacagccagcctgtgggcaggagagctgccctcagagccaagatgaaaaaaagagagtaagagatggaagaggaaggatgagaaaaagaaacacagaaaggggcgcacaaacagaaaaaaaaaaaaacaaaaacagaaattgacgccaagaaacaagagatgccaaaatagatctaatcatagaaagaggccacacgcagtggctcgcgcctgtaatcccagcactgtgggaggccgaggcaggaggatagcttgaggccaggtgttcaagaccagcctgggcaacatagggagaccctgtctctacagaaaatacaagttagctgggtgtggtggcgggcgcctgtagtcccagcaacttgggaagctgaggcaggagaattgcttaaacccaggaggcggaggttgcagtgagccgagatggtgccactgcactccagcctgggcgacagagcaagactctctgtctcaattaaaaagaaaaaaaacaaagaaagaaagtaggcagctggctcagtagctcatgcctgtaatcacagcactttaggagacagaggtgggaggactgcatgaggccaggagttcaagatcagcctgggcaatatagcaagaccctgtctctacaaacaatttaaaaattagccaggtatggtggcacacacctgtaattccagttactcagaaggctaaggtgggaggatcaccttgacctactggtcaaggctgtggtgagctacgatcacactgctacactccagcatgagtgatagagtgtctctcaaaaaaaaaaaaaaaaaaaaaaaaaaaaaaagaccagcatggtggctcatgcctgtaatctgaggcaggtggatcgcttgagcccatctactcgggaggctgaggcaccacagtcacttgaacccatgaggcggaggttacagtgagccgagatcgtgccacggcactccagcctgagcaacagagcaagactcggtcaaaaagaaaagacgagacaaagaaataaagtacgtttgggggttcacagggcaggtctctataatgtgatagaacctccattatgtcccatacagcccaggagtatcaccatcaaagaccaggagtgtcactgtcaaagcccagcagtgccctccatactccaggactgtccccatatcacggccccggagagaccccatcataccgcagtctgcccttgtcacagcccacacatgaccccatcacgtctagaactgccccctttatagcccaggactctcccccatcacagaccagggctgttctatgatggcccaagatgctccacatcacaagtccagattgtgcctgtaacttatcagaactggtccccagcagagccaagtactgtcccaaacagctcaggaatgtcccctatccaaagcccagcacttttccccattataaccagcattgtctctgccaaatatcagggcttatttcctattcaccaggtctgaaatttaaaaaaaaaaaaaaatcccattgttgtctttttcaatccccaggactatccctatgttgctgtctaggccagtaccttccagactgtccctaccatggtccagcactgtcctctccacaccccgggactgtccccatcacagctgaggactcagcccaattatctccattacaggatatctctatcttcatcagagcctaggaatgtcccatcatgagttcagggccattctatgacaccagaactgtgccatgatgagacggtccacatcagtcccaagtggacctgtcaaagcccagtactgccccaccacagtccaggagtgtcaccactaaagcccagattgcccacataccccaggtatcccaggactatccctatcagtcactaagagccgaaaaaagtgaaattctgccctgacattcatcagctaggataagagactcaaataaagtcaggtgtaaagttaacagacagttctcccaaggttacaccgcagctgtgaaggcttgtaatgacccctttctttggctgtttccttcctcactgagaaaccttgttctctgaaatcatagactctgggaaacgctgctgctgtttgacatcgcacagtcagaagggatcgtctcagccagcctgcagcatctgtcactttgaccatgagacgctgcctcgatttccaatccaggtgcaaagcttcagataggagtttgggaagcacagcaatccccatctcttatttttttcaactttcattccaagaaaataggaccttgagtccaattcccagagctgagacttgaggtccaactctgccttcacctgcacccggccctggaggtctgggcccctttattccagctcccgcacaggctgatgccccaccgcaccccagggctccgctccccaaatcacaacctccccacccccacgcctccctcattacagggtcctccaccatgtttccctttttttttttttttttacctccccgccaattacttgccccacctcatccgcgtctacctgctccccctcaccccattaaagcctcgtgctcctttccaaagggcgccatcctcctccgcgccctgcagcggaaccccagggcgggaggagcggcgccgagtcggaccggctgcaggccagtggtcttcccggaagtgcgcctcccccggttatttcccagaccccggcgcggggctgcgaacccacctgccccagagcggctgcggccatgatccgtgcggcgcgtaactgtgcccgcccggggcgcggctccgaagagagacgttccggccacgccccgctcacgcctccttctgggggaaggcggccgaccagcgccccaggccgtcccagctccagggcgtcggcagggagccggacactgctgcggggcgcaggcgctggtgggagggcaggacttgaaatacggtccctgccaggcgaagtggctcaggtctgtaatcttagcactttgggaggccgaagcgggcggattacctgaggtcaggagttagagaccagcctggtccaacatgatgaaaccccgtctctactaaaaatacaaaaaattagccgggcgtggtggcgggcgcctgtaatcttagctactcggaaagctgaggcaggagaattgcttgaatcggggaggcagaggttgcagtgagccgagatgatgccactgcactccagcctgggcgacagagtgagactccgtctcaaaaaaaaaaaaaaaaaaaaaaaaaaagtcctggcttggtggctcacacctgtaatcccagcactttgggggccaaggcgggtggatcacctgaggccaggagttcaagaccagcctggccgacatggggaaaccccgtctctactaaaaatacaaaaattaaggccaggcacggtggcttacgcctgtaatcccagcactttgggaggccgaggtgggcggatcacaaggtcaggagttcaagacccgcctgaccaacatggtgaaaccccgtctctactaaagatacaaaaattagccgggtgtggtggtgtgcgcctgtaatcccagctactagggaggctgaggcaggagaatcatttgaaccctggaggcggacgttgcggtgagccgagatcgcgccactgcatttccagcctgggtgacagggtgagactccgtctcaaaataaataaataaataaaaataaatacataaaaatacaaaaattagtcgagcgtggtgccgggggcctgtaatcccagctattcgggaggctgaggcaggagaatcgcttgaacccgggaggcggaggttgcagtgagccgacattgcaccacagcactccagcctgggcgacagagtgagactccgtctcaaattaaaaaaaaaaaaaaaaaatcgtatccctcggccatcgtgtctcggcaatcctaccctgggacactctgtctccaaattctacccccacagtgcccccaagtcctgtccccgggtcactatcctgccacccctaacagccacaggcccaaacagccaaaccgcgggacccttccctcacagggcgtcgccctgtttttctgcgctccgccccagtcctcctgccccacccgccagccccgggctgtagggtcggggcccactgacagctcccgcccccgccgcggccaatcagcggttggtgcacacgcccccccggccacagccaatccgcagcagccctgcagctccacccctcacctgggggacgccagcgcacccgggccctgccccccccctgggtccagctggggagtctgcgtcccccagtgccctgcggaccaaaacccaggagtttcagcccctcctccctctgatccagatgtctcaaccccctactttctcttccctttggacttttcttgccagccaccttcctattctacaggcagtgagaggaaaactccttttccctgagggccaagagtaagagggccttctgcgtctccccctccattacctcctaattagcgcttaatttactctcccctgcgggcctttagttagcgcgctggtgaagccaaaccgctctacccttcccaggagcccctggcgacagcgacagggctagcaacatcaggcacctgcttgctgcaaggcctggggttggggggcggggggagctgcagtccttcagggtcgaggcaacttgtgggtctggggtgcaagggctaagtggggcagaaggactcgtctaaaggatgggaaataaataataacgatatcctcctccttctggctgcaaatcgtttttatgggaacctgcagggtgacccggcaccttgctaactgggcttaragtctaagggcttgggggctgcatctgatacaggttggagtttggggtgggagagtcctaggaagggggccccaagtaraaatgagaraaatcaggaagggatatcgggggcgtccacgggggtgctccgactggccttgcacccgtaccccagctctgcaccccccgtcacgagcagttcaatgcccgtgcagaagttggcttcggaggccaggaacactgccgcagccccgacctcagcgggctggcccatgcggcccagtggctggggagaaaagaggggggaaggaggtcaagaggagccccacttgatcgccatgccccccacccccatgccaccttctaccacctggatctgaaccccacttctacctgggccagcatgccctctcggattgtggccctagggtctggcattaaggctgccagctcctcccacagcggggtccagatgtttcctggggagatactagaggaagggagaggggggatcaaagcaatctgtctcgaaccacttgggatcactcccagtcaccccagtccccccaggaggctctccgcctgctcagagcagctcaccagttgactcggacaccatatggactttcatccagggccaaagctttggtcatggctgttactgccccctgcaggaaatggagcggggaagaaagttcagtccccgggacatggggtccctgccatccattgtctcctgccagccaggggggcatcagaatggggaagtcatgccctccttgaaggctgccttcagaggcaccaggcttggtttcttgggagaaacttggcatagaaatctgtcacaggaaggccaggtgcagtggctcacacctrtaatcccagcactttgggaggccgggatgggtggatcacttgggccaggagttcgagaccagcctggccaacatggcaaaaccccatctctgctaaaaatacaaaaattaaccggacatggtggtgcacgcctgtaatcccagctactggggaggctgaggcgtgagaatcgcttgaacccatgaggcaggggttgcagtgagctgagatcatgccaccacactgcaacctgggtgacagagtgagaccctatctaaaaaaaaaaagaagaaaagaaaagaaaagaaaaaaagaaagttagccgggcacagtggctcatgcctgtaatcccagcactttgggaggccgaggtgggtggatcacctgaggtcgggagttcgagaccagcctgaccaacatggtgaaatctcgtctctactaaaaaatacaaaaatctagctgggcgtggtgacagccacctgtaatctcagctacttgggaggctgaggcaggagaatcacttgaacccgggaggcggaggttgcagtgagccaagatcacaccattgcactccaacctgggcaataagagcgaaactccatctcaaaaaaaaagaaagaaagaaaagaaaaaacagaaatctgctgggtrcggtggctcatgcctgtaatcccagcactttgggaggccaaggcaggcagatcatraagtcagaagatcgagaccatcctggctaacatggtgaaaccccrtctctactaaaaaatacaaaaaaaattagctgggtgcggtggcatgcgcctgtagtcccagctactcgggaggctgagtcaggagaatcccttgaacccaggaggcagaggttgcagctgagattgcaccactgaactccagcctggtgacagagcgagactccatctttaaaaaaaaaaaaagaaaagaaaagaaaaaacagaaatctgtcacaggcagttatgcctgggtgctgcatctrggagttaggtgtgagactttctagggccaagatcttgctaggtctggctcctaagttgtctggactcaaagccaaggcccatgggaaggagtagggagggaaggaaggggtaggggctgccataccttggtggccacatagggaactgcctgggcctggccgattgcccccaccaggctggagatgttgatgacattnnnnnnnnnnnnnnnnnnnnnnnnnnnnnnnnnnnnnnnnnnnnnnnnnnnnnnnnnnnnnnnnnnnnnnnnnnnnnnnnnnnnnnnnnnnnnnnnnnnnnnnnnnnnnnnnnnnnnnnnnnnnnnnnnnnnnnnnnnnnnnnnnnnnnnnnnnnnnnnnnnnnnnnnnnnnnnnnnnnnnnnnnnnnnnnnnnnnnnnnnnnnnnnnnnnnnnnnnnnnnnnnnnnnnnnnnnnnnnnnnnnnnnnnnnnnnnnnnnnnnnnnnnnnnnnnnnnnnnnnnnnnnnnnnnnnnnnnnnnnnnnnnnnnnnnnnnnnnnnnnnnnnnnnnnnnnnnnnnnnnnnnnnnnnnnnnnnnnnnnnnnnnnnnnnnnnnnnnnnnnnnnnnnnnnnnnnnnnnnnnnnnnnnnnnnnnnnnnnnnnnnnnnnnnnnnnnnnnnnnnnnnnnnnnnnnnnnnnnnnnnnnnnnnnnnnnnnnnnnnnnnnnnnnnnnnnnnnnnnnnnnnnnnnnnnnnnnnnnnnnnnnnnnnnnnnnnnnnnnnnnnnnnnnnnnnnnnnnnnnnnnnnnnnnnnnnnnnnnnnnnnnnnnnnnnnnnnnnnnnnnnnnnnnnnnnnnnnnnnnnnnnnnnnnnnnnnnnnnnnnnnnnnnnnnnnnnnnnnnnnnnnnnnnnnnnnnnnnnnnnnnnnnnnnnnnnnnnnnnnnnnnnnnnnnnnnnnnnnnnnnnnnnnnnnnnnnnnnnnnnnnnnnnnnnnnnnnnnnnnnnnnnnnnnnnnnnnnnnnnnnnnnnnnnnnnnnnnnnnnnnnnnnnnnnnnnnnnnnnnnnnnnnnnnnnnnnnnnnnnnnnnnnnnnnnnnnnnnnnnnnnnnnnnnnnnnnnnnnnnnnnnnnnnnnnnnnnnnnnnnnnnnnnnnnnnnnnnnnnnnnnnnnnnnnnnnnnnnnnnnnnnnnnnnnnnnnnnnnnnnnnnnnnnnnnnnnnnnnnnnnnnnnnnnnnnnnnnnnnnnnnnnnnnnnnnnnnnnnnnnnnnnnnnnnnnnnnnnnnnnnnnnnnnnnnnnnnnnnnnnnnnnnnnnnnnnnnnnnnnnnnnnnnnnnnnnnnnnnnnnnnnnnnnnnnnnnnnnnnnnnnnnnnnnnnnnnnnnnnnnnnnnnnnnnnnnnnnnnnnnnnnnnnnnnnnnnnnnnnnnnnnnnnnnnnnnnnnnnnnnnnnnnnnnnnnnnnnnnnnnnnnnnnnnnnnnnnnnnnnnnnnnnnnnnnnnnnnnnnnnnnnnnnnnnnnnnnnnnnnnnnnnnnnnnnnnnnnnnnnnnnnnnnnnnnnnnnnnnnnnnnnnnnnnnnnnnnnnnnnnnnnnnnnnnnnnnnnnnnnnnnnnnnnnnnnnnnnnnnnnnnnnnnnnnnnnnnnnnnnnnnnnnnnnnnnnnnnnnnnnnnnnnnnnnnnnnnnnnnnnnnnnnnnnnnnnnnnnnnnnnnnnnnnnnnnnnnnnnnnnnnnnnnnnnnnnnnnnnnnnnnnnnnnnnnnnnnnnnnnnnnnnnnnnnnnnnnnnnnnnnnnnnnnnnnnnnnnnnnnnnnnnnnnnnnnnnnnnnnnnnnnnnnnnnnnnnnnnnnnnnnnnnnnnnnnnnnnnnnnnnnnnnnnnnnnnnnnnnnnnnnnnnnnnnnnnnnnnnnnnnnnnnnnnnnnnnnnnnnnnnnnnnnnnnnnnnnnnnnnnnnnnnnnnnnnnnnnnnnnnnnnnnnnnnnnnnnnnnnnnnnnnnnnnnnnnnnnnnnnnnnnnnnnnnnnnnnnnnnnnnnnnnnnnnnnnnnnnnnnnnnnnnnnnnnnnnnnnnnnnnnnnnnnnnnnnnnnnnnnnnnnnnnnnnnnnnnnnnnnnnnnnnnnnnnnnnnnnnnnnnnnnnnnnnnnnnnnnnnnnnnnnnnnnnnnnnnnnnnnnnnnnnnnnnnnnnnnnnnnnnnnnnnnnnnnnnnnnnnnnnnnnnnnnnnnnnnnnnnnnnnnnnnnnnnnnnnnnnnnnnnnnnnnnnnnnnnnnnnnnnnnnnnnnnnnnnnnnnnnnnnnnnnnnnnnnnnnnnnnnnnnnnnnnnnnnnnnnnnnnnnnnnnnnnnnnnnnnnnnnnnnnnnnnnnnnnnnnnnnnnnnnnnnnnnnnnnnnnnnnnnnnnnnnnnnnnnnnnnnnnnnnnnnnnnnnnnnnnnnnnnnnnnnnnnnnnnnnnnnnnnnnnnnnnnnnnnnnnnnnnnnnnnnnnnnnnnnnnnnnnnnnnnnnnnnnnnnnnnnnnnnnnnnnnnnnnnnnnnnnnnnnnnnnnnnnnnnnnnnnnnnnnnnnnnnnnnnnnnnnnnnnnnnnnnnnnnnnnnnnnnnnnnnnnnnnnnnnnnnnnnnnnnnnnnnnnnnnnnnnnnnnnnnnnnnnnnnnnnnnnnnnnnnnnnnnnnnnnnnnnnnnnnnnnnnnnnnnnnnnnnnnnnnnnnnnnnnnnnnnnnnnnnnnnnnnnnnnnnnnnnnnnnnnnnnnnnnnnnnnnnnnnnnnnnnnnnnnnnnnnnnnnnnnnnnnnnnnnnnnnnnnnnnnnnnnnnnnnnnnnnnnnnnnnnnnnnnnnnnnnnnnnnnnnnnnnnnnnnnnnnnnnnnnnnnnnnnnnnnnnnnnnnnnnnnnnnnnnnnnnnnnnnnnnnnnnnnnnnnnnnnnnnnnnnnnnnnnnnnnnnnnnnnnnnnnnnnnnnnnnnnnnnnnnnnnnnnnnnnnnnnnnnnnnnnnnnnnnnnnnnnnnnnnnnnnnnnnnnnnnnnnnnnnnnnnnnnnnnnnnnnnnnnnnnnnnnnnnnnnnnnnnnnnnnnnnnnnnnnnnnnnnnnnnnnnnnnnnnnnnnnnnnnnnnnnnnnnnnnnnnnnnnnnnnnnnnnnnnnnnnnnnnnnnnnnnnnnnnnnnnnnnnnnnnnnnnnnnnnnnnnnnnnnnnnnnnnnnnnnnnnnnnnnnnnnnnnnnnnnnnnnnnnnnnnnnnnnnnnnnnnnnnnnnnnnnnnnnnnnnnnnnnnnnnnnnnnnnnnnnnnnnnnnnnnnnnnnnnnnnnnnnnnnnnnnnnnnnnnnnnnnnnnnnnnnnnnnnnnnnnnnnnnnnnnnnnnnnnnnnnnnnnnnnnnnnnnnnnnnnnnnnnnnnnnnnnnnnnnnnnnnnnnnnnnnnnnnnnnnnnnnnnnnnnnnnnnnnnnnnnnnnnnnnnnnnnnnnnnnnnnnnnnnnnnnnnnnnnnnnnnnnnnnnnnnnnnnnnnnnnnnnnnnnnnnnnnnnnnnnnnnnnnnnnnnnnnnnnnnnnnnnnnnnnnnnnnnnnnnnnnnnnnnnnnnnnnnnnnnnnnnnnnnnnnnnnnnnnnnnnnnnnnnnnnnnnnnnnnnnnnnnnnnnnnnnnnnnnnnnnnnnnnnnnnnnnnnnnnnnnnnnnnnnnnnnnnnnnnnnnnnnnnnnnnnnnnnnnnnnnnnnnnnnnnnnnnnnnnnnnnnnnnnnnnnnnnnnnnnnnnnnnnnnnnnnnnnnnnnnnnnnnnnnnnnnnnnnnnnnnnnnnnnnnnnnnnnnnnnnnnnnnnnnnnnnnnnnnnnnnnnnnnnnnnnnnnnnnnnnnnnnnnnnnnnnnnnnnnnnnnnnnnnnnnnnnnnnnnnnnnnnnnnnnnnnnnnnnnnnnnnnnnnnnnnnnnnnnnnnnnnnnnnnnnnnnnnnnnnnnnnnnnnnnnnnnnnnnnnnnnnnnnnnnnnnnnnnnnnnnnnnnnnnnnnnnnnnnnnnnnnnnnnnnnnnnnnnnnnnnnnnnnnnnnnnnnnnnnnnnnnnnnnnnnnnnnnnnnnnnnnnnnnnnnnnnnnnnnnnnnnnnnnnnnnnnnnnnnnnnnnnnnnnnnnnnnnnnnnnnnnnnnnnnnnnnnnnnnnnnnnnnnnnnnnnnnnnnnnnnnnnnnnnnnnnnnnnnnnnnnnnnnnnnnnnnnnnnnnnnnnnnnnnnnnnnnnnnnnnnnnnnnnnnnnnnnnnnnnnnnnnnnnnnnnnnnnnnnnnnnnnnnnnnnnnnnnnnnnnnnnnnnnnnnnnnnnnnnnnnnnnnnnnnnnnnnnnnnnnnnnnnnnnnnnnnnnnnnnnnnnnnnnnnnnnnnnnnnnnnnnnnnnnnnnnnnnnnnnnnnnnnnnnnnnnnnnnnnnnnnnnnnnnnnnnnnnnnnnnnnnnnnnnnnnnnnnnnnnnnnnnnnnnnnnnnnnnnnnnnnnnnnnnnnnnnnnnnnnnnnnnnnnnnnnnnnnnnnnnnnnnnnnnnnnnnnnnnnnnnnnnnnnnnnnnnnnnnnnnnnnnnnnnnnnnnnnnnnnnnnnnnnnnnnnnnnnnnnnnnnnnnnnnnnnnnnnnnnnnnnnnnnnnnnnnnnnnnnnnnnnnnnnnnnnnnnnnnnnnnnnnnnnnnnnnnnnnnnnnnnnnnnnnnnnnnnnnnnnnnnnnnnnnnnnnnnnnnnnnnnnnnnnnnnnnnnnnnnnnnnnnnnnnnnnnnnnnnnnnnnnnnnnnnnnnnnnnnnnnnnnnnnnnnnnnnnnnnnnnnnnnnnnnnnnnnnnnnnnnnnnnnnnnnnnnnnnnnnnnnnnnnnnnnnnnnnnnnnnnnnnnnnnnnnnnnnnnnnnnnnnnnnnnnnnnnnnnnnnnnnnnnnnnnnnnnnnnnnnnnnnnnnnnnnnnnnnnnnnnnnnnnnnnnnnnnnnnnnnnnnnnnnnnnnnnnnnnnnnnnnnnnnnnnnnnnnnnnnnnnnnnnnnnnnnnnnnnnnnnnnnnnnnnnnnnnnnnnnnnnnnnnnnnnnnnnnnnnnnnnnnnnnnnnnnnnnnnnnnnnnnnnnnnnnnnnnnnnnnnnnnnnnnnnnnnnnnnnnnnnnnnnnnnnnnnnnnnnnnnnnnnnnnnnnnnnnnnnnnnnnnnnnnnnnnnnnnnnnnnnnnnnnnnnnnnnnnnnnnnnnnnnnnnnnnnnnnnnnnnnnnnnnnnnnnnnnnnnnnnnnnnnnnnnnnnnnnnnnnnnnnnnnnnnnnnnnnnnnnnnnnnnnnnnnnnnnnnnnnnnnnnnnnnnnnnnnnnnnnnnnnnnnnnnnnnnnnnnnnnnnnnnnnnnnnnnnnnnnnnnnnnnnnnnnnnnnnnnnnnnnnnnnnnnnnnnnnnnnnnnnnnnnnnnnnnnnnnnnnnnnnnnnnnnnnnnnnnnnnnnnnnnnnnnnnnnnnnnnnnnnnnnnnnnnnnnnnnnnnnnnnnnnnnnnnnnnnnnnnnnnnnnnnnnnnnnnnnnnnnnnnnnnnnnnnnnnnnnnnnnnnnnnnnnnnnnnnnnnnnnnnnnnnnnnnnnnnnnnnnnnnnnnnnnnnnnnnnnnnnnnnnnnnnnnnnnnnnnnnnnnnnnnnnnnnnnnnnnnnnnnnnnnnnnnnnnnnnnnnnnnnnnnnnnnnnnnnnnnnnnnnnnnnnnnnnnnnnnnnnnnnnnnnnnnnnnnnnnnnnnnnnnnnnnnnnnnnnnnnnnnnnnnnnnnnnnnnnnnnnnnnnnnnnnnnnnnnnnnnnnnnnnnnnnnnnnnnnnnnnnnnnnnnnnnnnnnnnnnnnnnnnnnnnnnnnnnnnnnnnnnnnnnnnnnnnnnnnnnnnnnnnnnnnnnnnnnnnnnnnnnnnnnnnnnnnnnnnnnnnnnnnnnnnnnnnnnnnnnnnnnnnnnnnnnnnnnnnnnnnnnnnnnnnnnnnnnnnnnnnnnnnnnnnnnnnnnnnnnnnnnnnnnnnnnnnnnnnnnnnnnnnnnnnnnnnnnnnnnnnnnnnnnnnnnnnnnnnnnnnnnnnnnnnnnnnnnnnnnnnnnnnnnnnnnnnnnnnnnnnnnnnnnnnnnnnnnnnnnnnnnnnnnnnnnnnnnnnnnnnnnnnnnnnnnnnnnnnnnnnnnnnnnnnnnnnnnnnnnnnnnnnnnnnnnnnnnnnnnnnnnnnnnnnnnnnnnnnnnnnnnnnnnnnnnnnnnnnnnnnnnnnnnnnnnnnnnnnnnnnnnnnnnnnnnnnnnnnnnnnnnnnnnnnnnnnnnnnnnnnnnnnnnnnnnnnnnnnnnnnnnnnnnnnnnnnnnnnnnnnnnnnnnnnnnnnnnnnnnnnnnnnnnnnnnnnnnnnnnnnnnnnnnnnnnnnnnnnnnnnnnnnnnnnnnnnnnnnnnnnnnnnnnnnnnnnnnnnnnnnnnnnnnnnnnnnnnnnnnnnnnnnnnnnnnnnnnnnnnnnnnnnnnnnnnnnnnnnnnnnnnnnnnnnnnnnnnnnnnnnnnnnnnnnnnnnnnnnnnnnnnnnnnnnnnnnnnnnnnnnnnnnnnnnnnnnnnnnnnnnnnnnnnnnnnnnnnnnnnnnnnnnnnnnnnnnnnnnnnnnnnnnnnnnnnnnnnnnnnnnnnnnnnnnnnnnnnnnnnnnnnnnnnnnnnnnnnnnnnnnnnnnnnnnnnnnnnnnnnnnnnnnnnnnnnnnnnnnnnnnnnnnnnnnnnnnnnnnnnnnnnnnnnnnnnnnnnnnnnnnnnnnnnnnnnnnnnnnnnnnnnnnnnnnnnnnnnnnnnnnnnnnnnnnnnnnnnnnnnnnnnnnnnnnnnnnnnnnnnnnnnnnnnnnnnnnnnnnnnnnnnnnnnnnnnnnnnnnnnnnnnnnnnnnnnnnnnnnnnnnnnnnnnnnnnnnnnnnnnnnnnnnnnnnnnnnnnnnnnnnnnnnnnnnnnnnnnnnnnnnnnnnnnnnnnnnnnnnnnnnnnnnnnnnnnnnnnnnnnnnnnnnnnnnnnnnnnnnnnnnnnnnnnnnnnnnnnnnnnnnnnnnnnnnnnnnnnnnnnnnnnnnnnnnnnnnnnnnnnnnnnnnnnnnnnnnnnnnnnnnnnnnnnnnnnnnnnnnnnnnnnnnnnnnnnnnnnnnnnnnnnnnnnnnnnnnnnnnnnnnnnnnnnnnnnnnnnnnnnnnnnnnnnnnnnnnnnnnnnnnnnnnnnnnnnnnnnnnnnnnnnnnnnnnnnnnnnnnnnnnnnnnnnnnnnnnnnnnnnnnnnnnnnnnnnnnnnnnnnnnnnnnnnnnnnnnnnnnnnnnnnnnnnnnnnnnnnnnnnnnnnnnnnnnnnnnnnnnnnnnnnnnnnnnnnnnnnnnnnnnnnnnnnnnnnnnnnnnnnnnnnnnnnnnnnnnnnnnnnnnnnnnnnnnnnnnnnnnnnnnnnnnnnnnnnnnnnnnnnnnnnnnnnnnnnnnnnnnnnnnnnnnnnnnnnnnnnnnnnnnnnnnnnnnnnnnnnnnnnnnnnnnnnnnnnnnnnnnnnnnnnnnnnnnnnnnnnnnnnnnnnnnnnnnnnnnnnnnnnnnnnnnnnnnnnnnnnnnnnnnnnnnnnnnnnnnnnnnnnnnnnnnnnnnnnnnnnnnnnnnnnnnnnnnnnnnnnnnnnnnnnnnnnnnnnnnnnnnnnnnnnnnnnnnnnnnnnnnnnnnnnnnnnnnnnnnnnnnnnnnnnnnnnnnnnnnnnnnnnnnnnnnnnnnnnnnnnnnnnnnnnnnnnnnnnnnnnnnnnnnnnnnnnnnnnnnnnnnnnnnnnnnnnnnnnnnnnnnnnnnnnnnnnnnnnnnnnnnnnnnnnnnnnnnnnnnnnnnnnnnnnnnnnnnnnnnnnnnnnnnnnnnnnnnnnnnnnnnnnnnnnnnnnnnnnnnnnnnnnnnnnnnnnnnnnnnnnnnnnnnnnnnnnnnnnnnnnnnnnnnnnnnnnnnnnnnnnnnnnnnnnnnnnnnnnnnnnnnnnnnnnnnnnnnnnnnnnnnnnnnnnnnnnnnnnnnnnnnnnnnnnnnnnnnnnnnnnnnnnnnnnnnnnnnnnnnnnnnnnnnnnnnnnnnnnnnnnnnnnnnnnnnnnnnnnnnnnnnnnnnnnnnnnnnnnnnnnnnnnnnnnnnnnnnnnnnnnnnnnnnnnnnnnnnnnnnnnnnnnnnnnnnnnnnnnnnnnnnnnnnnnnnnnnnnnnnnnnnnnnnnnnnnnnnnnnnnnnnnnnnnnnnnnnnnnnnnnnnnnnnnnnnnnnnnnnnnnnnnnnnnnnnnnnnnnnnnnnnnnnnnnnnnnnnnnnnnnnnnnnnnnnnnnnnnnnnnnnnnnnnnnnnnnnnnnnnnnnnnnnnnnnnnnnnnnnnnnnnnnnnnnnnnnnnnnnnnnnnnnnnnnnnnnnnnnnnnnnnnnnnnnnnnnnnnnnnnnnnnnnnnnnnnnnnnnnnnnnnnnnnnnnnnnnnnnnnnnnnnnnnnnnnnnnnnnnnnnnnnnnnnnnnnnnnnnnnnnnnnnnnnnnnnnnnnnnnnnnnnnnnnnnnnnnnnnnnnnnnnnnnnnnnnnnnnnnnnnnnnnnnnnnnnnnnnnnnnnnnnnnnnnnnnnnnnnnnnnnnnnnnnnnnnnnnnnnnnnnnnnnnnnnnnnnnnnnnnnnnnnnnnnnnnnnnnnnnnnnnnnnnnnnnnnnnnnnnnnnnnnnnnnnnnnnnnnnnnnnnnnnnnnnnnnnnnnnnnnnnnnnnnnnnnnnnnnnnnnnnnnnnnnnnnnnnnnnnnnnnnnnnnnnnnnnnnnnnnnnnnnnnnnnnnnnnnnnnnnnnnnnnnnnnnnnnnnnnnnnnnnnnnnnnnnnnnnnnnnnnnnnnnnnnnnnnnnnnnnnnnnnnnnnnnnnnnnnnnnnnnnnnnnnnnnnnnnnnnnnnnnnnnnnnnnnnnnnnnnnnnnnnnnnnnnnnnnnnnnnnnnnnnnnnnnnnnnnnnnnnnnnnnnnnnnnnnnnnnnnnnnnnnnnnnnnnnnnnnnnnnnnnnnnnnnnnnnnnnnnnnnnnnnnnnnnnnnnnnnnnnnnnnnnnnnnnnnnnnnnnnnnnnnnnnnnnnnnnnnnnnnnnnnnnnnnnnnnnnnnnnnnnnnnnnnnnnnnnnnnnnnnnnnnnnnnnnnnnnnnnnnnnnnnnnnnnnnnnnnnnnnnnnnnnnnnnnnnnnnnnnnnnnnnnnnnnnnnnnnnnnnnnnnnnnnnnnnnnnnnnnnnnnnnnnnnnnnnnnnnnnnnnnnnngaggccaaggcaggaagacagtttgaactcaggagttcaagaacagcctgggcaacatagcaagacctcctctctactgaaactaaaaaaaaaaaaaattagtcgggtgctgtggcatgtatctgtagtcccagctactcggcgggctgagaggatgaggtgggaggatcccttgagcccaagagttcaaggctgcagtgagctgtgatggcaccactgctcaccagctgggaagacaaggaaaggaggaaagaaggaaagaaaaaagggagggagggaggaaggaagaaagagagaaagaaagaaagggccgggcgcagtggctcacacctgtaatcccagcactttgggaggctgaagcaggcggatcacgaggtcaggagattgagatcatcctggccaacatggtgaaaccctgcctctactaaaaaaaaaattagcccggtgtagtggtgcgtgcctgtaatcccagctactcgggaggctgaggcaggagaatagcttgaacccgggaggcagagattgcagtgarctgagatcgtgtcactgcatgccagcctggcgacagagcaagactctaaagaaagacaaaaaaaaaaagaaagaaagaaagaaaagaaaagaacaatggggagtttcagtayacatgaattatctgtactattctaggaatattttgtaagtcttaaattatgtcaaaataaaaatwaaaagcattctaatacactggtggtatggtacgcatgaagttcctactgataaaattgtatgatctgggctgggtgcggtggctcacgcctcccagcactttgggaggccgaggcaggcggatcacttgaggtcaggagttccagaccagcctggccaacatgatgaaacctcatctctactaaaaatacaaaaattagccaggtgtggtggcgtgtgcctgtagtcccagctacttgggagggtgaggcaggagaatcacttgaacccagcaggtggaggttgccatgagctgagatggtgccactgcactccagcctgggcgatagagcgagactccgtcgcaaaaaaaaaaaaaaaaaaaaattgtatgatctgggtggtggtggggggcaggagtcaacgggtagagcaagttattcttgctttgttttgtttgagacaagttcttactctgttgcccaggctggaatgcagcggcacaatcatagctcactacagcctcaacctcctgggctcaagtgatcctcctcagcctcttgagtagctgcgactacagatgtgtgccaccctatctggctaattttgtttatttttggttgagatggggtctggtgctatgttgcccaggctggtcttgagctcctgagctcaagtgattttcccacctcagcctcccgaagtgctgagattgcagcatgataaatattgataagagtttcatgggtatttaatctaatctcattaaatcctcagaacaactctgtcacaattggccccatttcacaggtgagaaaacagaggagcagaaatgttgcgtaacttgcatgacgttgcaggtaagaagtggcagagaatttaggcaaacaagccacttgttatttctgcctccctgccccgcaggtcctgttgaccaacttgaccaactttatttatttatttattttgagatggagtcttgctctgtcacccaggctggagtgcagtggcgcgatctcggctcactgcaagctccgcctcctgggttcacgccattctcccacctcagcctcccragtagctgggactacaggcacccgccaccgcgcacagctatttttttgtatttttagtagagatggggtttcaccgtgttagccaggatggtctcgatctcctgacctcgggatccgcccgcctcagcctcccaaagtgctgggattacaggcgtgagccaccgtgcccagcccaacttgaccaactttctaagagaaacaagaaatgtggtggtttatgtgaaatctgycttgtgaaatgttggcaatgaatgaaaaaagataggccrgacatggtggcttacgcctgtaatcygagcactttgggtggccgaggcaggcagaccgctatagctcaggagtttgagacctgcctgaacaacatagtgagacccccaactctacaaaaaatacaaaaatcagctgggcgtagtggtgggcacctgtagtctcaggtcctcgggaggctgaggcaggagaatttattgagcccaggtagtcaaggttgtggtgagccgagatcctgccactgcactccagcctgggtgatggagcaagattgtctcaaaaaaaaaaaaaaaaaaagtaaaagaaaagaagaaaatatatatatatatatatatacacacacacacacacacacacacacacacacatatattaactcttcatgggctgaggtgtaggtgtgttttatgtgtggaggtgtttttagtgttgggttaatcctagaaagtcaacacaaatttggaacaggagccagggttcactggttaagcaggggattgcccaacctcccgggaacatttcacctggatcttggatgcgacctcagagtcagcacctgaagctccctggacactgggcccgcccccaggcctctcccctctttgcctactcttgctcccctgagttcctccagcctcaaactggtcagctgcaagctggtatctccagagccccacctccacgatctcatgcccaatgcccattcccaccaggacgtccaccaggcagttcatgttcaacagcgcccccgccaggctttcctgccacagtgaatggcagctctgtccggtcagttgctcagttgctggaggtggggagaacaaacctaaaaccccactttttttttttttttgagatggagtctcgctctgtcgcccaggctggagtgcagtggtgtgatctcagctcacctcaacctctgcctcctgggttcatgagattgtcctgcctcagcctcataagaagctgggattacaggcgcccaccaccacgcctggctaatttttgtatttttagtagagacggagtttcaccatgttggccaggctggtctcgaactcctgacctcatgatctgcccgccttagcctcccaaagtgctgggattacaaagacatgagccaccgtgcctggcaaggacagggattttcttctgttgtgtgttcatagctgtatgcgcagggctccgcatgttgctggtgctatataactatttgttgagttaattaattaaaaagtgctatgcggagaataaagatgttatggagagtggatgtttgtgtgcagctgttgcataagcaagggtgagggaaaggctttgatgtgtgttcttctccttcgtttttttttagatagagtcttgctctgttgcccaggctggagtgcagtggtgcaatctcagctcactgcaacctccatctcccaggttccagcaattctcctgcctcagcctcacgaggaattgggattacaggtgctcaccaccatgcccagctaattttttgtgtatttttagtagagacggggtctcaccatattggacaggctggtcttgaactcctgatgagtgatccacccgccttggcatcccaaagtgctgggattacaggtgtgagccaccgtgaccaacccttctccttccttttttttttctttttttttttttgagacggagtctcgctctattgcccaggctggagtgcagtgrtgcaatctcggctcactgcaacctccgcctcccgggttcacgccattctcctgcctcagcctcccaagtagctgggactacaggagcccgccaccgcrcccagctaattttttgtatttttagtagagacggggtttcaccgcgttagccaagatggtctcgatctcctgacctcgtgatccgccggcctcggcctcccaaagtgctgggattacaggcatgaggtgccgcgcccggccaaaggctcaactttttaaagaaaaaaggacgaatcaagagaggcggtgattacaaaagttgttcatcaggaattgtcattggtttacagacatcacattgattagtgattggctatacatggttgaactatagagtgtgtgacactctagagctacttggtatcaggtcgtctagagtccrgaaaccaagtagcctcaaaaggtaattattggaygggtgcagtagctcatgcctgtaatcccagcttgaggcaaggagttcgagaccagcctgagcagcatagaaagaccctgtctctacaaaaaagttaaaaattagtcagtcatagtggtgcacccctgtggtcccagctgctcaggaggctgatacaagaggatcacttgagcccaggggttcgaggctgctgtgagctatgatggtactccagcctgggcaacagagtgagtccctgtctcaaaaagtaattaaaatacatttttataaagtccctctgagccaggtgcggtggctcacacctgtaatcccaggagtttgaaaggctgaggcaggagaatcacttgagcccaagagtttgagaccagcctggacaacatagtgaaaccccacctctattaaaaaataaaaaggccaggcacagtggctcatgcctgtaatcccagcactttgggaggctgaggtgggtggatcacggggtcaggagttcaagaccagcctggccaacatggtgaaacctcgtctctactaaaaatacaaaaaaattagccaggcgtggtggtgagtgcctataatcccagccactagggaggctgaggcagagaattgcttaaacctgggaggcagaggttgcagtgagccgagattgtgccactgtactccagcctgggtgacagagtaagactctgtctcaaaaaataaattaattaatttttaaaaaagttgttaaaaagcccctctgggcctgatcctgatcatctaaaggggctctcctttctcagataaaaaagtttgttttctttctcattccctccccagctctcccccaattcttgtttaagacaaggactcgctctgttgcccaggctggagtgcagtggcacaatcacggctcactgcagcctccagctcccaggttgaagtgatcctctcacctcagcctcccgtgtagctgggattacaggagcaccaccatactcagctaattttttttttttttctgagaaagagtttcactctgtcacccaggctggagtgtagtggcacaatctcagctcactgcaacctccacctcccaggttcaagcaattctaccgcctcagcctcttgagtagctgggattacaggcacctgccaccacgcacagctaatttttgtatttttagtagagatggggtttcaccatgttggactcctgacctcaagtgatctgtccgccttggcctcccaaagtgccaggattacaggcatgagctaccaggcctggcttttttttttttttttttttttgtgagacggagtttccgctcttattgcccaggctggagtgcaatggcacgatctcagctcactgcaacctctgcctcccaggttcaagtgattctcctgcctcagcctcctgagtagctgggattataggcatgtgccaccacacccggctaattttgtatttttaatagagatggggtttctccatgttggtcaggctggtctcaaactcccgacctcaggtgatccgcctgcctcggcctcccaaagtgctgggattacaggcgtaagccaccatgcctggactccatgctctttttaaaaattaattaatgaattattttttttttgagacaaggtctcactctgtcacctaggctggagtgcagttgcacgatctcagctcactgcaacctccgcctcctgggctcaagctgtgataccctaaccttgttttaacctgaattgactctcccttaggtgagcgagccagacagactccatcctggctccttcacttgcagccccttaacccaacccccctttcttcaaggacttaacttgtgcaagctgactcccagcacatcaaagaatgcaattactgataagatactgtggcaagttatatccgcagttcccaggcagtcgcccgattaatagtaccctaagcccccgcgtttctgtctggttgatagcgcccaacgtccagcgtctatcaccttgggatgtgtttaaagcccctgcacctggaactgtctgctttcctgtaaccatttatctttctaactttttttgcctgctttacttctgtaagattgttttaactagactcccccctcccctttctaaaccaaagtataaaagaaaatctagccccttcttcggggccgagagaattttgagcgctagccgtctctgggctgccggctaataaaggactcctgatcttgtctcagagtgtggcgtttctctataactcgctcggttacaacaaagcaatcctcccgcytcagcctcccaagtacctgaggcgcaccaccatgctcaggtaatttccgtattttttgtagagacgagggtttcactatgttgcccaggctagtctcgaattcctgggcttaagggatcctcttgcctcggcctcccaaagtgctgggattacagctgtgagctactggacctggcctatttatttatttatttatttatttatttttgagacagcatcttgcaatgttgcccaggctgtagtgcagtggtgtgtacatagctcatggcagccttgacttcctgggctcaaacgatcctcccacctcagccacctgagtagctgggactacaagggcaccacyacgcctaattttttaaactttttgtagagatggggggtttcgctgtattgccccagctgtcttgaactcctgacctcaagtgaacctcccacaaggacctcccaaagcactgggattaaaggtgtgagccactgtgtctggccccaatatgttcttaacatcccctcctaccaccaccagtctggaaggttctagaaggttcctaagactgggctatgtagctacaaaggtagatttgctggatgtagagattcgcagtcatttatcttccttttggaataaggagattaaactaaataacagaaaatagatggccaggcgtggtgactcaagtctgtaatcccagcactttggaaggccaaggcaggcagatcacttgcagtcagaagcatagctaccaaaaattatgaaatttagctggttttgtggcccgcacctgtaatcccagttactcaggaggctgaggcacgagaatcrcttgaacccaggaggtggaggttgcagtgagctgagatcacaccactgtcctccagcctgggcgacagagagagaccctgtctccaacaaacaaacaaataaaaagaacggaaaacattttgctcttagacaaaatgcatcacacaatccacctatcaggaggctgctcgggcctggcggcagggtcgccagccctcaccttggtcaaggtgtacgtccccagtaggttcagctccagcagctggcggaatccctgggcagaggtctcctcaggcctctgtgggggtgggtctaaagtggggggtgagagagagaggaaaagtgacgggggctggacacagttgcccacgcctgtaatcccagcactttgggaggctgaggcaggcggatcatgaggtcaggagttcaagaccaacctggctgacagggcaaaaccctgtctctacgaaaaatacaaaaattagctgggtgtggtggygggtgcctatattcccagctactcaggaggctgaggcaggagaattgcttgaacctgggaggygcaggttgcagtgagcctagatcgagccactgcactccagcctgggcgacagagtgagaccccatctcagaaaaaaaaaaaaaaaaaaagccgggtgcagtggctcatgcctgtaatcccagcatttggggaggccgaggtgggcagatcatctgaggtcaggagttcaagaccagcctggctaacatgatgaaccccatctctactaaaaatataaaaattagcctggcgtgctggtgggcgcctgtaatcccagctacttgggaggctgaggcaggagaatcgcttgaacccaagaggcagaggttgcagtgagctgagatcacaccactgcactccagcctggacgacagagtgcgactccatctgaaaaaaaaagaaaagaaagaagagaagagaagaaaaaagaaaagaaaagaagagagacatggccaagtgagggcacagccctggggacacacaggagggatggaacagggccacagtttcagcacaggcctggggggcttccattgctttactctcctgtccaagtggctagaaagaggtatgaggcaggatgagggaatcaggggcagggagtggggaaactgacgtgcaggaaacagagttggggggcaggaggtggagaatggccctggggtctcacaactcacggtggccagcgttgttgacaacacaatccaggcggccaaatcggcggatggtctcagaaaccagggtctgaggagaaaggaaatgtcctttgttttttttttttggagacggtgtctccctcttgtcactcaggctggagtgcattggcacgatcttggctcactgcaacttcagcctcctgcgttcaagcaactctcctacctcagcctcccaagtagctgggattacaggygactgccaccacgcccggctaatttttgtactttttagtagagacagggattcactaggttagccaggctggtctcaaactcctgagctcaagtgatccacccgcctcagcctcccaaagtgctggaattacaggtaccacgcccagcccaggaaatgtcctttgaatgagcagtagatggggtgtccagccataaagaagacagggctcccaaatgcaaggcaggagggggaagctgaactcccaggtcaggggacaagagctagaggaagaggggactccgagatcagcagacacagcaggcaagcaggagacaggaaggagacagggggctggtcagagccacactgcagtcgtcacacccagggtcagggggtggggcaggggggtgacaaggattcagagagcgcgtaggggacagttgcccaaggggggcagataacagagagatactgattaaaaggaagaaataggaacccagaaataatggagaaaaaatcagttacatacaggccacgtgcagtggctcacacctgtaatcccaacactttgggaggctgaggtgggcggatcacctgaggtcaggagttcgagaccagcctggccaacatggtgaaaccctgtctctactaaaactacaaaaattagccagacacggtggctcatgcttgtaatcccagcactttgggaggctgaggcgggcggatcatctgaggttgggagttygagaccagcctgaccaacatggagaaacaccgtctctactaaaaatacaaaattagccaggtgtggtggcacatgcctgaaatctcagctactcgggaggctgagagaggagaatcacttgaagctgggaggcagaggttgcggtgagccgagatcacaccattgcactccagcctgggcaacaggagcgaaactctgtcttaaaaaaaaaaaaaattagccgggcatggtggcgcacacctgtaatcccagctactcgggaggctgagataggagaatggcttgaactcggtaggctgaggttgcagtgagccgagatcacaccactgcactccagcctcagtgacacttacaaraaaaagagacagaaaaatcagttccagttgacccactttgagggacttattcatttccatccacatgttaaatgtgctaagagccttggagaggtgtgacagaaggaacatgtgacctgcccatcagtcacagaagaccttgtgtgtggagtgacactgggtggaaacctttgacgagtccagcggagccaggagaggaaggaaaagtagagggaaaggcatatgcaaatggctggaggagaacaaagaactggtcattagcggagatgggggtaggaacaggaactcggcttaccttcacatcatcttcctgagtcacatcacagaggataaagacagctccagggagctcctgctccagggcccggcccccagactctgcagggagagaagagctgggagcctggacccctgggtctcagggaggaggggttggggacttggactcctgggtctgagggaggaggtgctgggggcctggactcctgggtctgagggaggaggggctgaggtctggactcctgggtctgaggaagtagggcctgggggcctggactcctgggtctgagggaggaagggctgggagcctggactcctgggtccgagggaggaagggctgggagcctggactcctgggtctgagggaggaggggctgggagcctggactcctgggtctgagggaggaggggctgaggtctggactcctgggtctgagggaggaggggctgggggcctggactcctgggtctgagggaggaggggctgggagcctggactcctgggtctgagggaggaggggctgggggcctggactcctgggtctgagggaggaggggctgaggtctggactcctgggtccgaggaagtagggcctgggggcctggactcctgggtctgagggaggaggtgctgggagcctggactcctgggtctgagggaggaggggctgggggcctggactcctgggtctgagggaggaggggatgggggcctggactcctgggtctgagggaggaggggctgggagcctggactcctgggtctgagggaggaggggctgaggtctggactcctkggtctgagaaagtagggcctgggggcctggactcctgggtctgagggaggaggtgccagagcctggactcctgggtctgagggaagaggggctgggagcctggacccctgggtctgaaggaggaggggttggggacttggattcctgggtctgagggaggaggtgccggagcctggacttctgggtctgagggaggaggggctggggacctggactcctgggtctgagggcagaggggctgggggcctggactcctaggtctgagggaggaggggctgaggtctggactcctgggtctgaggaagtagggcctgggggcctggactccggggtctgagggaggaggtgctaggggtctggacctctgggtctgagggaggaagggccaaggtgagggctgagggaccgtcactcaccatccttgtcgcagataaccactcgggccccgctgttcactgagaataggaagggaacaggttactctccgagccttggttaaagcctctgccgccctcttgtggccacctggattggggctgatctccctctcccctcgtgaccccagtctcatgatcacccataggacagagggcagacgccttgacacatactctccttgccttgtttctgctgaggctcctgaacccccgttcgtggcttccggagcaaactccacgactgacagagccattcctcaaaccactggttttgtagctacaccaacagacccagagaaaggggccactgccttcggagaccctgccagactcagccctagcctacagcgccacacgcttactttagcctgcaaattggcttttataatatcagaatcctggctgcagtactggagtccctattttccgcccccatcaccccgcccccatccttcctttctcacactccacagctcccagcagtcagacccggctcaccgaaggcgcgcacgatcccagctccgatgccgcgcccgcccccggtcacgaccaccaccttcccggcatagcgcgttcccgtagccatcccgtgtacgtcggtctctctctctctctactctgggcctctttcacctccaaagccccgtgaggccgtcgcatcaaatcctcaatagaggctggatcctggaagtccggcctcggggggcgttgccaggaaggctagagacctggaagtttgtccccagcccctcctccctcagacactcctctcttcccacagacccaggaatccaggagccccagtccctcctcccacagacccaggaatccagaagcctcagtccctcctccctcagactcgggagtccaggcccccagcccctcctccctcagactcgggagtccagcctcccagcccctcctccctcagacccgggagtccagcctcccagcccctcctccctcagacccaggagtcagggtcccagcccctcctccctcagacccgggagtccagcctcccagtccctcctccctcagacccaggagtcagggtcccaccccttcctccctcagacccgggaatcctggcccagccccctccactctcagaccgagggatcaggttctctatcccttcttcccagagacctataagtccaagccccctgtcccttcctctctcaggacccaggagtccacgactccagctctgcccctcagagacaccagtgccacaaccccagacagacagaaagaaagctattgactaaaagttcaaagttttaatccaaatttagacagtgttgagaaaaccaaactttggccatagaaaccattcccctcccgggcccgcaatggggaccagaccacgccccctgatgccctgagtggtcccagatctccggcggtacctccagaccacgtcctcgcgctccgattggctgccgcttttgggcggattagaagctggattgtagcagagtgactcgcagaggccatgccccctcgtcttgtggcaggaccggaggggcgatcccggcatcccacgcgggcccccagggggtgggacctcctccacgcccactccctcggcgagagaaccccgtggaacccgaattagccaccgggggagatctggggggaggggtctcctggcgcgtggggtccgaaggaggcagcggcacaccgggaagagggtctccctgggagtccaaatttccacctggagaggatgagtgggacatgagaatggcaaacctcagcgctaggaccccggattcccagcccctcctccctcagacccaggactccggattcccagcccctcctccatcagacccaggagtccaggcccccagcccctcctccctcagacccaggagtccaggcccccagcccctcctccctcagatccaggagtctggatacgccagtccagtcctctttgagactcagttgtcggccctctccccgccccctgacctcttcctcccctcctcccaagtgtcccggaccccagtcacctcttgcctgagacctaaaactcccaaaccctgcccaactctttactcaccaagataaaaaattctcaccggcccccagacccctcctctccaggacctgggattccaggtctccagctctctcctccctaaaacccagaagtccaacatccccagccagtcacctgtcatcattctgtgccactgcgacgcctcagtagccagggcttgggagaggctgagaacccgctcccggtgaccttcggaagtcggcaagtaaggggtggtgttccttggactagaaaaaaaaagaagattgggggtgggggtgtgtacatgggggagaggtgggggatggttaattggtacaaaaagaaaaggatgaataagacctactattagatagcacaacagaatgactatagtcaataataatttaattgtacatttttaaataaattaaagggtgtaactagattgtttatacatcaaagggtaaatccttgaaaggggatggataccctattcccgatgatgtgcttatttcacattgcctgcctgtatcaaaacatctcaattatctcgtaaatatatgtatacctagtatgtaccaacaaaaattaaaaattaaaaaaaaaaaaaaaaaagcaggccaggtgcgacagcttatccctgtaatcccagcaccttgggaggccgaggcgggcggatcacttgaggtcaggagttcgagaccaccctggccaacatggtgaaacccagtctctaccaaaaaatacaaaaaagttagccaggcatggtggtgggtgcctgtaattccagctactagggaggctgaggaaggagaatcatttgaacccagaaggcggaggttgcagtgaactgagatcacgccattgcactccagcctgggagacagagcaagactccgtctcaaaaaaaaaaaaaaagtaaaaaataaaaataaaaataaaaaataaacagctggcacagtggggacccgggtaccgcacgtgcctttctgggagttgtagttcctagcacgtgtctctaaaatacgttaaacatggcaccgccctcataccgcccacatgcattacgggatttgtagtccactcgcgcgtcactatcacccaatttccttgatgcagaagtaggatctgctattgaccaagggaatttgaggaactaaagatatcactacggatctagggctttctggttttgttgcagatgccccgggaacttaagcatctctagaagggttgcgatttgtacttccatattcaggagactttaataataatgctactcccctttgcttttgcaaatttttttttcctgctcccttgatacgccctccagttccttacctactccaggacccagagcttctgagccatttctgggctcccgagtgtcctacgacaggctggaaaggaattggggcattagaactcctcacctggaagccccacgttctcattttgagggtgaagtgaagggggctccaaaagagaatgaaattgcccaaaaacactggcaatgttttgttttgtttttcctatgcttctgtaggcactgaatttttaaaaattaatttattttatttattcattttttagaaaggatggagtacagtggtgtgatcataactcactgtagtctcgacttcccaggcttggactaatcctgcttcagcctcctgagtaaatagaactacaggctcgcaccaccatgcctggctaattatttttatttttatttttagtagagacagagtcttgctatgttgcccaggctggtctcttactcctgcctcggcctcccaaagtactggtattacaggggtgagccatagcacccagtgactgacaatgtttaactttacctgtgttcctataaagcagcacatgagttcagaaatcccacctccaccaccaccacctgtgacttgtctaaatcctttctataaaagtctaaggggccgggtctggtggctcacacctgtaatcccagcactttgggaggccgaggtgagcagatcacttgaggtcaggagtttaagaacagcctggtcaatatggtgtaaaccccgtctctactaaaaatacaaaaaaaaaaaaattagcagggtgtggtggcatgggcctgtaatcccagccacttgggaggctaaggcaggagaatcgtttgaacctgggagacaggggtcgcagtgagtcgagattccaccactatactccatcatgggcaacaaagggagactctgtctcaaaaaaagaaaaaaaaaatctaaggggaggttaggtgcagtagctcacacctatattcttagcacctccttccaaggcaggaggatcacttgagctcaggagctcgacaccagcctggccaacgtggtaaaaatctgtctctactaaaaatacaaaaattggctggatgtagtggcatatccctgtagtcctagctactcgggaggctgaggcatgaaaatcacttgaacccaggaggtggaggttgcagtgagtggagatcgcaccactgcactctagcctgggcgaccttgtccctgaaaaaaaaagaaaacatcttttttttttttttttttgagacagagtttcactcttgttgctcaagctggagtgcaatggcaaaatcttagctcaccacaacctccacctcctgggttcaagcgattctcctgcctcagcctcccaaggagctgggattacagacatgtgctaccatgcccagctaattttctatttttagtagagacggggtttctccatgttggtcaggctggtcttgaactcccgacctcaggtgatccgccctccttggcctcccaaattgctgggattacaggcgtgagccaccatgcccggccgaaaaaggaaaacgtctaaggggaaaccatcctgagatatctgagacactctgatgttcagatctgggacgttcttcctattgaaagggcatgaataaaatcaattttcttcctggcttacattttcttttttgctttcttgctattgacaacacatagcaactgagaagaaaaactaggcttccaatccagatgtgtgacccccgcccccacccactgtcctcccctcactgccactcctgtccacccaccactatccaggcgaggaagctgactctagcacaagtacaaactggggtaaattcggaaatccagtttggaggaaggaggtagtgattatctccattttacagaaagggactcaaagtaggcgaagaggacctactaccaccccaccgcccagccccagccctcctcccctcaccctttgctccacgtcaggctggcgtctggctggggacagtgtccttcccagggtgagaagccggggggaggtcgggcgagggaagggccgtccacattcctggtttctgcgcatccgctccagctgctcctgggcactcatccggggccgggccaccggggcctagggaggcgagaaacgtcccaagacccaacctttaggccaggcacagtggctcgtgtaatcccagcacttttgggaggctgagtagagaggatcacttgaggtcaggagttgaagaccagcctggccaacttggcgaaataccatctctactaaaaatacaaaaattagctgggcgtggtggcaggcacctgtaatcctaattactcaggaggctgaggcaggagaattgtttgaaccccagaggtggaggttgcagtgagccgagatcacgccactgcactccagctgcacaacagagcaagactctgtctcaaatatatatatatatatatgttgcttaaacaaggagagagggagaaggccgggtgcagtggtgggtgactgtaatcccagagctttgggaggctgaggtgggaggatcacttgcggccaagagtttgagaccagcctgggcaacatagcaagaccccatctctacaaaaaataaacttgttagatgtggtggtggatgcctgtcagctactcaagaggctgaggcagggggatcacttaagcccaggagttcaaggcttcagggagctatgatcgtgccactgcacctcactctgggtgacagggcaagatcccgtatctaaaagtaaaaagtaaagacagagagagcactcattgctgaagcttccagttaaacatcccagtgagatagcatggatctgtgcttattgtagaaccagtccctgcagtttcctctgctttgaccaatcctgagtcctgtttatataaatgatggccagtggccactgtatattaccctatgttgttaatttattttctttttttttttttttttttgagacagagtctcgctttgtcacctaggctggagtgcagtggcgcaatctctgctcactgcaacctccgcctcctgggttcaagcacttctctgcctcggcctctcaagtagctgggattgagtaggtggcacccgccaccacgcccagctaatttttttgtatttttagtacagacagggtttcaccatcttggccaggctggtcttgaactcct

SEQ ID NO: 94452 - DNA, 40230 bp, Homo sapiens
  misc_feature (1)...(40230): n = A,T,C or G
aagaaaagtcatgaaaaagagaaaacaaaacaatgagtctgaatgaaagcagctttggaagccaggaccagccaggcttgggccatctcacagggtatttgctcctattcctcagctacaatttgcatttccaatttaaccatttttatttgctagtcccattcctgtattgggtctggatatttgcagaagaagaaaaagaaaaaagtgggtgaatgtagaggatgaggaagaaggttataaaataaatatttgagtcagtagatcttcattcggatatctaacagacatcccaacatcagcatatccaacctgaatcctaaactccccctaaaactctgtgccacagggagcctcccccatctcaggtgatggcgactccaaccttccagttactgaggcctcaagtcttggatcccatccttcactcttctctatcatactccatatccagtccattaggaaattctgttgggtctaccttcagaatagcctccaaatcttatcatttctcacaatctccagctgaattcacatcatctctcattttgattactgcaaaaccttccaacaagtctccctgcttagactcttgaactcctacaaccaaatctcctcactagaggaatcgtttaaaaatgtaagtcaaagtgtgggccaggcgcggtggctcacgcctataatcccagcattttaggaagccaaggtgggccgatcacgagatcaggagatcgagaccatcctggccaatatggagaaaccccgtctgtactaaaaaatacaaaaaaattagtcaggcgtggtggcaggtgactgtaatcctggctactagggaggctgaggccggagaatcgcttgaacctgggaggcagaggatgcagtgagccgagatcgcgccattgcattccagcctgggcaacaggaggaaaactctgtctcaaaaaaataaaaataaaaataaaaaatgtaagtcaaagtgaaagaagccagtctaaaaaggctgtatgatttcaaccatatcacattctggaaaagtcaaaattatgaagacagtaaaaaaaaaaaaaaaaattagtgaatgccaggcatctggcggggggagatgaataggtggagcacagaggatttttaggatagcaaaactattctgtatgatactataatacatgcagatgcatgtcattatacacttgtccaaacccatcaaatgtaccactccaagagcgaaccctaatgtaaactgtggtggtaatgatgtgtcggtgtaggttcatcaggtaggtaggggtgttgatgtgggggaaactatccgtgggtggaggcaggctttatatgggagatctctgtgcctttctctcagttttgctgtgaaccttaaactgctttaaaagataaagtctattaaaaaaaaaaaaaaagtaagtcaaacgatataatccagagccctgcacaactccccttttcaccagatgaaaagccaaagttcttaatgagtagcattaggagctttgctctggctatttcctctgtctgaaatattatttccccagtaatctacttagctaattcttttgcatcctcaaatctttgctgaagtttcacctctccgtgagagagactctatctgccctacctagttagtattgtaaaccactacctgcacccccatgcactcctgatcctccttatcctactttacttttttccaagtccttcttacttacatactgtatttattatgcactgtatttatcatcctgatagtttaatctctcatctccttctgctaggttgtaaattccacaatggattatttggtttgctgatgtatctgcttagaaccatcaaatgctgaatggatgaatgaatgaatatcttcgattgaaagctccatcttccattactcaaatttcccattcttaatgtatctcagaagctaatattgagaaactgagggattagttctgtgcatcttaattcaggtactgattgaaaaagaaaaaccaaaatctccatagggcatgatgactctggagaaggaagggataccttgtgagctattcatctaaggaagagaggaattacaaactaaaatattagttgaccactaatattttaacattttaatgtattttcttgctgtccagaagttttaaatacctgtataaagttatcgttttttttctctattcattttgtttgtatttctgcattctttaaggactttcctaccaccaacgttgtaatcatattcttttatacttgttctaatgctcatccaatttaggttgtgtgtgtgctatttaaaaatttgtgtctggtctttaatccctttggaatttatgcttgtgacttgtcagaaatagggtgctaacatcattttcataaatacagatcagcccagaccatatactaaataatccagcctttcctcattgatttgaaatgtcaccttatcacacagtctgtttttaattctttattcctttgatttatttattgtgacatcaataccaaactatttttaattatgacattaaactatattttgattttctggtggtaatctctgatttcaacattacaatttactactcatttattactgatttgagcttaaatcagtcatccgtacattcatgtgataaatatgttatgcactgaacataaaaatattgttgactaggctgggtgtggtggctcacgcctgtaataccagcactttgggaggctgaggcaggcagatcacgaggtcaagagatcgagaccatcctggccaacatggtgaaaccccgtctctactaaaaatacaaaaattagctgggcgtgatggcatgcgcctatagtcccagctactcaggaggctgaggcaggagaatctcttgaacctgggggctgaggttgcagtgagctgagattgtgccactgcactccagcctggtgacaaagtgagactccatctcaaaaaaaaaaaattattgctgactggactcaactgttcaaatgtaaattcaatggattggggcctagactctacttttttaactaagggttttttagcggggaggaaagggaatggcaacatttattttccttaaatattggttaagttgctgatggatccataaacaagaaagatcagctttgctaacttcttctgaagcaatatgtctaaatatgaatcagaggttggggctctaatggaaagcctaaaaatgtggacaaaggctggggaatgagaaaagcagaatgccatgtaatatcctaaaagccattattatttcaatttatttcctatctttagtctgacaattaggtggcaaatgacttttcacataaaaattagggcaaggtctttcctcttcctctattaaacttcctttgagagttacacacaaagtcatgcccagtgaaccatcacaacatcctaggaagatcctgtgtatatgtgctcacaagtacatttaattgcatgttcccactcccccagattagccttttgcaaagttaactcatttaatctccaaagaatacagtaattgttgagcaaaagaggatgagaatcagctgaaagttgcaatcagggagaaggttcaggtttattccataaagatagaaatgacaccagaaagtctaccacctttacctgggtcagaaaagttgaatgtatttccaaagactcttaaactgtgggttctttaaaattttaatgcttacctccccctgacacacacacatacacaacaattacaggagttattgacatcagtttgtgcataagaactatagtaatattcaaatataatttatttgagtacaagagtggacctctatccaacaagtatttgttgagcatctactatgttggtgatagaaaagtgaaccagacacaattccttccctcagtcaaggaactgccccttcccaatcatgtgctttctatcaatgtccaagacagataagtaagcagtcttgtaactgcttacttacatgtgggatgacagaattcttgtttactcataattattgacatccaaggaaatctcagcctactctaaagctgattataaatttcataattcctgctctacacactctccttctctctttaaacatcaagtctaatgtgattagccaagttacatgacctaacttgccggcttaatgctattttacaccccttccttcattactgaagttaaaaggcttaatcttaaagtcaaactagacattattggactgtccctatggttaaaaacccacctaggccaggcatggtggctcacgcctgtaatctcagcactttgggaggccgaggcgggcagatcacttgaggtcaggagttggataccagcctgaccaacatggtgaaaccccatctctactaaaaataaataaaaaaaaaattagccgggcatggtggtgcgcacctgtaattccagctactccggaagccgaggcaggagaatcacttgaacccaggaggtggaggttgcagtgagccgagatcgagccactgcactctagcctgggcaacagagcaagactccgtctcaaaacaaaaaacaaaaagcaaacaaacaaacaaacaaacaaacaaacccaaaaaacctcaccttattaactagttcttttattcaccaaactcttcaaagagcttctcttcaaaggcttctcttgcacagggagaaagcggttggttccatttggggcagtcatatagggctgttttccaggagatgacatgtgggataagtcccagggtaagcatgggctgcttgaggttgggtttgtgatcacaaaatacatatggaataagctaggacttcaaggtctgagatcactgaaaaagaccaaggaaacacctgggtcctggaacatattggatacataccatctcccaaagatcattaagaagacttaaagctccagaaagatgaaaaacgggcactcagttttaaaactcagaaagtacaaaaagaagcaacagcactggccttgaagagcatatcctccaacagttgttcttaacctgttttcatcttcactattatgatacactatttttgaaaccctgacccagagtggagattcaaaataagaaattactttccttccttaagtagtttatctggtctagaagtaatccctaaaagaggaagagacctgttcattaactctcataactactccagagctccgtatcagaattttagaacaaaaacttcaaaagtgaaatggagaagcaagaattattatccagctttggttctcaatctggctcacacctccaactgtgcagattactgttaatgaaactgtggttcaacgctagtctatattgaatgctgctccaaaggcacagggtaaatattgctgacaatacttctaagtgctctaatgagtagagctcgagagatgaataattccttaactgagcatgatgctcagttagaggtggagggcatgcttaatctggtaatcacttataggaaatgtgggtaatttctctcgggagaacaagccctgttactcataaggcgccctaatggacagtgctcaagagaataggcactattgcactcctaatttaggtctggcacacgtccacattctctagatgacctccctcctcccttcttttccccccaaaagtaatgaaataatggctgatggcatgatgtaagcagcatcatagtggaaggtgtaacctgggctttggagttagatctaggtttgaattctggtacactctactacatagctgagaacactcatttcattacagtgttgttattactagagacagggtctcactctgtcacccaagctggagagcagttgcatgatcttggctcgacctgccaggctcaagtaatcctcccacctcagtacctgagtagctgggactacaggcatgcgccaccatccctggctaatctttgtatatatagatagatggataatttttttttttttttttttttttttttttttttgggtagagacggagtttcaccatattggccaggctggtctccaactcctgagttcaagtgatctgccagccttggcctcccaaagtgctgggatcaaggcatgtgccactgcgcctggcctcatcacagtgttctgcttttatctgctcctgaaagctggggtgtgctgtagtaaacttagaaacaggaaatacagaacagccattttctcctgctgatcatattccctgccagttttctactacctggcccactgatcgccttgccagatgtcttcccagctgtaataagccctgtttcccaggactcagtcatagccataaccaatgctttccctagaaatggctcttacaaagtctcaggaaagctgaagttggacaacaaccttttttttttttctttttaagagacggggtctcactctgtcaaccaggcaggagtgcagtggcacaatcacagctcactatcrcctcagcctccagagtatccaagactacaagcacacaccaccgtgcctacttatttttttgtagagatggggatctgactttgttgcctgggctggtcttaaactcctggctttaagtgatccttctgycttggcctcccaaagtgctggaattataggcgtgagccaccatgcccagcctataccacaaccctcattcagctggtctcccccggggaggcttcatctaacagagccaagactgtcctctccatacacttaggtttgtgtttgctacttggtttttatattaatcacctttcacatccatttatatgcaaaattaatagaaataaaggatgcaatttgtcatcaatgatggttcataataatcatttaggcacttgtagaatgaaaactactaargtttctaggactaagaagaaatactaaagtaatacacttattaccaccaaagccactacattttttgaggtgtatatttcacaaggtatgcataatttagatgacaaattaaggctcaaattttaaggatgaatagctatttcattgatctcacatggctcactaggcaacagattcccatttaaaagggataattgagtttaatgggatgctaactataaggggctgagtagggttaagggaaaccaagtcaagatatccagtcagcagtgtccagtagaaatttctgtaacgatgaaatgttctacatctacattgtctaatacagtagccaaagccacacatagttattaagcacttaaaatgtggtcaatgtgactaagccactgaatttattaattcgtttaaatagtcacatgtygtcaatagctaccacattggacagtacagttcaggtctagcaaagagccatcacaactcctaggcctgaaaaggtgaagtaaaggaacaattactgaaacctgggatgatgcagaattagaactctgtcttcaggaaaggattacacggcaggagctgtagcctttgacagaagaatgctgccactgccaacttgcaaaccaacaggggaagaattgggaataaataccaactcactctcactcttctttttgcccccattcccctctggtgcctctgactggtggaactcaaccaaaaagtaaagagagctccttgatgcagcccataaaggtcagcctcttggagcacaraacagtgaaaggtggagagtatatctggaacaaaacattattataccccgtgcaaaatgaattgaggcatcaaaagtttgctttattgacacttataaatctaaataaatatggaaccaatagcaaaacatttaaaaagtatgttggtaaaggaagtcctmcaagtgtttcctgttgttaaaactatccgagttttctgttgcaacaaacaggacaatgttttaatcaaactgtgactgtgttcatttcaggtttcctacatgaagaattgtcaatactacgctccctcaactatattcaaccaaggatctgcgtgaaactttttctaaggtaccatctcaaatatattcaaccacggaactgcgtgtaactttttctaaggtaccatctcaaatcacaaggcctgggattgggaaattgttttactttactaaagaccactgtaactcaataaacgaacttagattagaaaattagaggcagaccactactcctctcggactgcatggccactgtcttcagctgttttcygtagtgattgtttctaggtattttacctattttaccaacctttttcactttttgcactgaatagtgctaagggaaaaaaaggatggggaaaggaggagtggcagtatctatagctagagggtcatcctatttgtggaaaactttattgtctactttagtgggtcctgaatattagtccagtccttactgcccagcacttaaggaagaaaggtctaatgtgactgtatgggggttgaagtaggtaccaaaggaaaagcagttcccaccacctccaaggagcaggagctgttgctcttcaggaagaaggatactagtatggttgtgtaacattaatggccatggcacatatgttgtgtcaatctgatactcagagctcaatcctgtagtcaaattgatcacagtcactccaggaaatgaggaggaatgaatccagatccctccaaccagtaacagctttccattgagcacatgagctgtgtgggagtaccttggggtaatgggaggctggatgtctactgactcccagaggaatccacaagagattggtctcagaaagagcacagagttcaatggctcctcagaagccccgagacctccagcaataagggctcccccttgccaagtgcaggcactgtgagaatgccgggcttcaggtacttctccctccactgggatcctgacccaagccattgtccctacatggaggaaatgccagtcacttagtacaggttccaccacgcttcgacccccatacacaaacaaatattcctgattctgacaggacacttctgttgttgaatgccgccaacaacacaaagtggaatcatcctttcggccagcctttgttattgtcactttcaggtcctcagtgttattatcctcactcttaaaaaaatgaagctggagaacccccaaggctggacttactggggacagtctccctcccagaaccagaacccgactctctgagagtcttgtcatggtgtgataaaggcgtccatcccactgaactccagtcccacaactgcctatttggctgcctttccattcagagtcacaatctcttgagagcaagtgaaactggctcactcggcagtgccgcccctcctgctctccaaatcctcctgcactgagaataacgtctgggctcaagaagacagaggcgtggccatatctcttcaggtttgggacctggccctcgctactgactacgctggcagggaatacccctgaaggcgaagcaggatttacgcgaggaaatgcctctgaggatggaaacactagggtgtgggagagggtgtctcccctagaagctgccagaatgaaataatgggcgcacttcagatgccactcctcaaattcgtcaaagggttcaatattttccacccgccggcgttcttctgcgggaagaaagcagtgatagaattcattcatgtccacggcaccgcaggcggtccagccagcttgaaggaagcggcgccgctgcgcctccacgtcaggaaarcgctccaggccatgcaggggggagtttagctgccgaaaatgttgcagcatgaactggccaaaggcgtcttgaggcctcatctgctcatagaccacgaaaagggcattaggaaaacgctgggctgcccaggcgatgagggccgcggcactckccggctcgaggtaggtcagcaccgcctcggccaggagcagagtgggtgaggctgcgtcgagccccgcggcgcccagggcctcctccactcgctggagctgccgcaagtccagacccaggatgcagtagtctgcgctctcaaagcacagcgcggacgcgggctccccmctctcgaaaggcccggttaacgcgcacagctctggcgtctctccaatcctttctgctttgcgccgcgccacgtccggaaaatccacctcccagactgcagcccgggccaggcggcccgcggtttttaagcgaaaatagagcgagtcgaagccagcgccgagagacaagatctgcgcgcgaagcgcggcctggggcgcgccaatctgctccaaaaaagcgcgcacgcagtgcctcacggcgcgtgcgcggacgtagtagcctcggtgaatgagcggtgcgcggcgcgccgcgcccggaaccagcaacgcggcaaaggggtcctgcacgtacccgcgcgcggccagggaacgcttgctgagggcgctgctgtcgttggtgttctgtaccgcgcctgcccgacgctcacggctccgggggcccatggccagaagagactcaggaatggcagtctgtcacggttgtgagccgccccttggttagcacacmcctcacggacctcggtagggggaaaaaaaccacccatgctcctggacttccccttccgccggcacttgtgcgtcacttccgggaagagcgcatctcgccaaccagaattgaggagggtgtagccagtgctaagttygcttgcggctgacctttctttggaatgtygtgagttccatttgtcccagaatacggtccgctaccgctgtgacatgagtgttagggaaggcgggttgtcacgtttctacaagccttccagtcaaaagggaaaccttgcctaagtccttgtagttgagaaatctctaagaggtgagtctgtggggactgacgacttggcttccttggaccgccaaggaagggtctggtaggagccaagaagggtcggcaccacggaccttcagtaggcaaggattagttagcttccttgggtgctaatagttgctgatttatttaatgctctcacagttgcaaaagagaaccccatttaaaacttgaaaacaagtcactaaggccagggtgcaaactgaagaaaccgacctttacaaataatttatagacacctaacaagaagacgtttccccacagatagtagactgttgattcccttgtattcccagccctatgttagactgacggtgaataaaccactcagcctctctttctcatcacaccgccttggagaattctgtggattttaaagtagtgttgaatatgtccccagaaaggggagtcactgaagagaggtgattgttccctgtgatatgttctgagctttgtttttaaggagtaaatccaggttagacttcagaataatcataaagtttctaaattgggtgtctgggagtcatccataggaaaccacttccagagacatttaggaaatttatcatttgttcactgggatttggtgactgactggctgaaatagaaaaggaaatcagataactttatggttaactacaggtggtactgcataatggttaagagtgtgagttttggagtccagcagatttggatactggagtcaagaaaaagtttcgtattttccaatgttttcttgtggaacaaaatgaaataagaaagaaaaggtttggatcaggataaagattcggtaattgaaaagtgacatttagatttggtgtttaaaagctcattaatggccttagggagagcagtttctgtggagcaataagggcagaatccatgtttcagtgaataggaggtgagttaaaggaggtatccagtctaaattattatactttcgaggagcttaactcagaaggaaaaaagggtcagggcagtggctaaagaatattgtgggataaaagagtcttttgttttgttttcaggtggaagcaaatactgcacatgcgtgttggtcctgtgagggaaaccagctagtggagagggagaggttgaaggaacagaaaaatgagaagayaactcactggtagagtaacttggaatagatagaaatgggatcctgggcacgtattagttgtggggataggagaatgaatcctttatctgtgactcctgatggggtaaaaaaaagattatggataatcataagctcaggtgtgaggtagggcagagagaaaaagaaggaatttgcacctgatggcttctgttttctctgtaaagttggtgacagagttgtcagtttagtgtaaggcattcagatctgatggaacatttgagcagtttgagaattgcttctgaagggattagaagaagggctcacctatgcctgctgggtcagtggatcctcacctctaaaatgagattaagtactgcttcgtgaggtatctcagggttgattgaggggcaaatagaaaaaaaaaaaaagttgaaggactttgaaaaatacgtagcaccatagaaacaaatttatttaatgacaggttcctaaaatgtaggtgttatgtcaaaaatactacttgttttgcaaagaccagatcaagaaaagtaattaaagaagaaagagaatggagtaaaatttctgatttcgatgccttatgatttaggccgggggaggaggggccattgtttaaatctcagtttattcttatataaaatggggataataatatctcaggggttgttgtgaggatttaaacaaaataactatctaagacaccacagtgcctggctcatggtaagtgcataataaacagtaacaaatttttttttattctgagttcccttttgggggagtaggtgggagcatgaaaaaagttccctgggagacaggatacttgcttctggccctgctctaatattgatgaagtattactaacgtggatcttatcccagtgtttgttgccttccgtcccagagcaaaaccagtccagaaaagttaaatttgtcatggcatgctgttgttggtatccatgttttaggcaaggaacaacaattttttttaatgtgtaaagattatgattgcttagttgctttttaatttccataggttaacattgtagccagtgggtcagtaaatttactcacagctagttaaaggtcagtctggaggatggtttgaatggggcacaaattaaggtcaggatcctggagtaaaattgaaaatctggccgggcgcagkggctcgctcctgtaatcccagctcaggctggtggatcacttgagcccaggagtttgagaccagcctgggcaacatggtgagaycccgtctctacaaaaaaaattttatataaaattagatgggcattgtggtgcatgcctgtgatctctgctgcttaggaggctgaagtgggaggatcgcttgagtctggaagcttgagactgcagcaagctgtgatcgtgacactgcactccagcctgggcaacaaagtaagatcctgtctcaaaagaaaaaaaaaaaaaggtatgtttttccattttaattaaatcatttatgtttttcggtagagatattaaatgccattgattaaatagtccatctttttcattttttactatttattaagcacttactatggcattactttgaaatgccatgtttatctcatactaagtaggcctttctatggatttctatggctatgtttagtcctatacaaactactttctttattgtacattttaatatcttggtaacttatttaaccccactcagtatcaatttattgattttcaatacagtaatatttcacaaagttatttcaaggattaaagataacattattaaaagcgcttgtcacatacctgttaggttccaaatacatggaaactgttattcttaaacatcatcctcattaatacgtgagaacccagagagtcaaggtggctagtttgaaaatcactaaatttcacttggaattttatcttcacttataaaccactttcagaagtgaagggaaattatgattgatttatcacctacagtgtgctaggcactgtgctaagtgttagagtggtggaataattcaaaggacctgtcctcaaggaacttacagtctggtgagagagaaagacaagtatatcagtgattgagatatcagtgtgattaaatgctgagttaaaggcagtgactggctcatgtgggaacatagatgaggggaatttaaaatactttattaatcgtcactgctactttgcatttttaatcccatttttgtaaataaagaaactgaagccatgaaggtgagtgactaaggccacacagcttctaacctgtagagctggtaaaaggacaaacctaggtccatctaatgccagcacctctgttcttcttttatatattttaaacaattcaaaatttaaaattttatttttggccgggcatggtggctcatgcctgtaatcctagcactttgggaggctgaggcgggtggatcacttgaggtcaggagttcgagaccagcctggccaacatggtgagaccctgtctctattaaaaatacaaaaattggccaggtgtggtggcatgtacctgtaatcccagctacttgggaagctgaggcaggagaatcacttgaacccaggagatagaggctgcagtgagctgagaccatgccagtgtactccagcctgggtgacagagggagactgtctcaaaaaaattatatatatatatatatatatatatatatatatatatatatatatatattttatccaaagtaggccttataaaattttgaatttttgaagtcgttgtatagaaggtgccaatagttaaggaatatactctactaaatgtcaggttttagtacacctcttataagcttgaggtcttttcctgtttccagtttatgttgtttactaatcgttttcccaccttagacacacttaagttagttttagaggagcttttgccttttaaagaaaaaattaacaaaatcctgtttctttgcttttacatstgaaaatattaacatttgttaaaataggtgaagctgaacccagatctacacatacagctaatcttaccaaaatgtgtggaagtaaagcaatctgaaggaaattcagtaccatacaatttactgactgaaatacatcatattgctcatactaagaataagagtggagaagaatcatttttttcctgctaaaatgatagaggcagaagagcaacagccttgcaagacagacttctattctgaattgccaaaagtggtgagaattcaactacagaaatcttgagtggttgctaattataatgactttgatgttgcttcttttcatcaaagtaaattttggctgggcgcagtggctcatgcctgaaattctggcgctttgggaggccaaggcgggtggattcacctgaggtcaggagtttgagactagactggccaacatggcaaaaccccatctctactaaaaatacaaaaattcgctgggcttggtggcatgcctgtagtcccagctactcaggaggcggaggcaggagaatcgcttgaacccaggaatcggaggttacagtgagctgagatcgcaccagtgtactccagcctgggtgacagagggagactccatctcaaaaaaagaaaaagtaaattttgtaggcaaaatttgtaaactttattatgtagctaaatctagtaagcagtttgcctattgcaaactaccaacattaagtacttggtaagatgctatgaatctrttggatatttgataagttttactggttgtatctcttaggaacttcatgcccacttgaatggatccattagttctcataccatgaagaaattaatagcccagaagccagatcttaaaatccacgatcagatgactgtgattgacaagggaaagaaaagaactttggaagagtaagtgtggggaggttgtggacatactcctttttttctctatcagtattttgagattgtaagtagtatgtaagaattcagattttggtaaacagaaatagggttggcatgtggtgtggagcatatatcttaacatacaacatttttttccagctgttagactgttgacagtatttctagtgatttctgttgtttgtgaagttatattgggatattctttcttttctttttttgagacaggatctcactttgttgcctagactggagtgcagtggcgtgaccacagatcactgctgccttgacctctggggctcaagcagtcctcctatcttagcatcccaagtagctgggaccacaggtgcacgccaccatgactggctaatgtttttttaatttttttagagatgggggtctccctatgttgcccaggctggtctcaaactcctggcctcaagctatccactcgccttggcttcttaaagttctgggattacaggcatgagccattatacccagcmtgtgatagtctttagatttgaaaatataggcatattgaatttccccatgtcaggtgtgggttggagaaggggtactattatttcccacttaaaaatatcagtaatgttttattttctatcatttgattatctttccagatcaatgtaatttttgaaacatctattctgtagttctttgtaaatataaatatatatttactattagcctaaaatttaattcattcagttagtgagtttctttgatgactagattatgttaaaacttttcattcatgttgcagatgtttccagatgtttcaaactattcatcagcttactagtagccctgaagatattctaatggtaagacatgaaggaatttttagaatggtttaaaaattatgaagtaatttccttccattattgcacatggcctttcatttttgctctcattaagagtgatgaaaaatgttttctctattatggcaactcttcaaaacctatgtaagtcatttgcctaagagctagtacagaaaaactgtgtttcttgtaaaagatatgaggaaagaaccatgaagagcatcttctataggatagaggatgatatggaagagaaaatttggtcctgtttttcatatataacatacatatatgaaatattagggctgggcgtggtggctcacgcctgtaatcccagcactctgggaggccgaggtgggcggatcacaaggtcaggagttggagaccatcctggctaacacggtgaaaccctgtctctactaaaaatacaaaaaaaaaaaaaattagccgggcatggtggcgggtgcctgtagtcccagctactcgggaggctgaggtaggagaatgatgtgaacccgggaggyggagcttgcggagagccgagatcgcgccaccgcactccagcctgggcaacagagcgagactccgtctcaaaaaaaaaaaaaaaaaaaaagagaagtattagaccacagatggggatatccttaataaggcattgtctgtattacataggagacttactgtatgggtggacattatagagaaggaagaagttcaagaagagcttagagagtaagtgattaatccctagggaaattgtgctttccctctgagggcacaaaggataccactgtgttctcttatctgaagctccatgatactagagtctgacatggaagattgtcttctgtatcattgatctgactaggatggcattttaaaatgttctctttctaaatggagagaagcaaaattgtgtcagtgatcttaaccagtagaaaaaaaatgcaaagaaagtataacctgtttctggagaggtaacttttgactgatcaagcaaaaattttcctctttggtaaagactgatcttcatgataagtggtaagtaaattaagcaccttttagaggagaggtaactctaatagtttcattcaacaaaagttgactgagtgcccacaatgttccaggcactgtgctaaagtctgagagagattgacacagtttctgcccctgagaaatttataattaggttggagagacagacccataagcagatactgcaacatagtgtggtaagctctgcattagacacacacataaggatttatagggaaccaaaagggcattctctaagcagcgtctcaaaagataccattgaacatagctaagaatatccaccacaggggccctggtctcactttgttgatgagtgttatagagcaaaatgattaaattgaaactttgacagtttaatactctatgggtatattaatggcatgcttgttgctacattcatttcaaaatgaaagttgaaaagctttattaaatgaagtgagaagattctgtgcatttgacctagtgctactaggtggttcagagggtgacaatggggtgccccatatgataaatgaaacgtctatgaggataaactaagagattgtaaatgtagaactgagtgtgagggagatcacttaaaactctagtcaaggtgacctgggtataatctcaaagagaggattggagtgtggctgaaaaaatgatacttgttattacatgtaccagacattattcttaggactactttcagaagtaggtatttttattgttccctttttgtagatgaaaaaataggcttaaagaggttaagtgtaacttgcttaagatcacacacacagagtaagtggcagtactatctggttgcagagctcatgctctttcccattcaagcttatacagtcttagagaggtttgagtaagtaggaacttaactaattgtgatgtactttgtctggaaaaagaatttgaatagatattctcagtccagcgcataggagaggaaagcccaaagagctgttctcagtacctaccgcactacctgctgcacatcacagaaagggctaaatctggcaaacacagatgtagaccccagggaaatgttcttggatgtgggttagggatggttctgtaggcttcactgtggcctagataaatcttcctccctttgttcttgctccatacttgttagtttttcattgttcatttggttttacaggtacctagccactcagaaagagggagccttggatagtagtcactgaaaaggactactatttcaaaccctcacttcaaccgtattcctcgttgtcaaacagctttctgcattagtctcatgtgagctggggtagctgagtgtgggtctgttctgttctggggcagtgacaagatccagattcctcaacctattaatacaaaggtgaggccacaatttcatggtgtcagtgacagcaagagggagttcctggagtagcagtgccrtggggccaatgccattcatgatggcatggaggctgcagtatcatgctccttggaggaggcagcagtggtatcttgcttggtcctggagtttcatgtgatttagaatgcagatgtattatctttggctgtgtattctcagaatctgggtctttagacctcttgatgaaactgagctacccattccacttacattataataagttcatttttgtctttagtggaaaaagaaaaaagaagaggcctacaacttggattgctatgaattcaccaaggtagtgccatactgttaggcactgtatgtatgaacagccagcccctcttgctttgccaggacactgcactcacatgcttgtgtgtgtgtagtcaaagcagattaagattaggataccaactgtaaggactaattacggcagtttgtcacagcttcgccaacctagcctttttttcttctagattttttaggattgaaggcagaaaggaaaaacatccttcaggaaatccttcaggaacttttggattattgagatttgcactaaattggatacagttttactcatatttatcacctactttctttgccctaagtacttctcgagaaaatttaaccctgccagaatttattgaaaaatgtaacttattcctaaataacttgaataaaaaccttaagccatgacttcaaatagcacatcagtaatacctaatcattttagctgtttatttctgtatgtgcatttcctagcagtctacacatacagatggttccagctggttttagttttgcrccatttctctattttatcaatctgctattataaatactaggaaataaatgtttaaaagggggaaaagaagcaaagggtgtagctgatrtgcagattgggattgaatgtgggaatgaggggtgatgggagtgattggaaatattgcagccctgcatagtctccatcagggatgtgacaaagtggataatctctaccacgtgagaaacttccaacattacttgcaaatcagatttaatgaataaaataaagctgtagcacttggcacattcattgggacccttacccaaacattatcaatattgtgtacgttatctttattatcaggtcacaaaagatgtcataaaagaatttgcagatgacggcgtcaagtacctggaactaaggagcacacccagaagagaaaatgctacyggtagaatttatacttctcagcaaatgtactgtccttttcctatgtgctttgatcactcacatgtttgtgagtgggaatatgaagcactaacttttatactattgtgttgttctgtatttcattgaacctttagtcaacagtccaagtcctctctctgatgtacattaatgatgttcattttgtttgttttagagacagggtcttkctgtcttgcccaggctggagtgcagtggtgcaaacatagctcactgtaaccacaaactcctgggcccaacaatcacctcagcctctaaaagtgctgggattacaggtgtgagccaccgtgcccatcctgatgtacattattaatgagtgagttattcttaagtaaaaagtagtaaaattccagtcaggcattatctgtttaaggmaggaaacaaaggcctgcagcagtttcttttgttcttccttgtttagttgttttcactctgagaaaaggatacctgctccttatgtttgcattgttacaagcagaggctgattcttgcttcctgcatcatgggcacttgtgagacaatgccattgagtggatgcagaatcatgttttatggtagttactaaaatgtaggttattcattcgcttctcagggaatagtttcttaggccaggagcaagctgtgatgtggtaaaacctctctggatagagatgagatctggctatgatctggaggaatttcctgagatcctccttctataagagcagcatcaggagacattggggccctcttagcaccttgtttatgacccaaagagacctaggtcatcttgtttcctgatatatgtagctcagtaatcatttgggggtaaaatttttgaaacttattgtaaagtataagtgtttacataagataaggagaaggctctcatcttgcatttttgaaccatagaatcagttccacgttgtactsgtgagagtagtgaaagggaaggagagaagagccaactcatagggctctttcaatggagttttaaaagaaggatattaacctaaatatgcaacagtagaggaatggttaaataaaggctaatggaatattaggcaaccattaaaaatactggtgaagacactttaatgacatggggaaatactcggactcatgttaaatgactgaactgggtacatatatacctagtagtatcttctctatttaaaaatgtgtatatgggcagagtgcagtggctcatgcctgtaattccagcgctttgggaggctgaggcaggaggatcacttgacgccagaagttcgagaccagcctgggcagcatcataagaccccccccacctctatgggctccaagggctgcagtgaaccatgatcgtgccactgccctccagcctgagcaacagagagagaccttaaaaaaggtctcttgaaataatacataaaaataaatgtgtatatgtgtacttggaaaacagtagttatctctgggtggtggggttatttttatttatttattttttttgagacggagtcttgctcgtcacccagactggagtgcagtggtgggatcttggcccactgcaacctccgcctccaaggttcaagtgattctcctgcctcagcctcccgagtagcagggattataggcacatgccaccacacytggctcattttcwtatttttagtagagacaggatttcaccatgttggccagggtggtctcgaactcctgacctcaggtgatcggcccgcctcggcctccgaaactgatgggattacaggcatgagccaccacaccctatttttatttttatttataattttatatattttaccagagactttccaccaaacataagcattttataatcygggtaaaagggtattttattttacccaatgtagcctaaagaaaaagaaaaaaaggtattttacaggaggttgctctggagagtgctcttgcagatcccctcagagagcagagcactcagacttggaagaacatgcctggttccctggatgagaaacactaagcccgagcaggattgaggggaaaggaatccaagttaggactttttttctggactaggaggagagaaaatatcccttttaaaaaaaaaaaaaaaaaaaaggacaagtgtagtggctcatacctgtaatcccagcactttgggaggccaaggcgggcgtgtcactttcagcccaggagtttgagaccagcttgggcaacatagcaaaaccccgtctctactaaatatccaaaaactagctgggcgtggtggtaccttcctgtagtctcagctactcaggaggctgaggtggcaggatggcttgagctcaggagacaaaggttgcagtgaggcaagatcatgccactgcactccagcctgggtgacagccagaccctgtctcaaaaaaaaaaaaagcctttattttttttcatttcatttctctaacacttcatttccccctaattttattaaaatataatttgcatttactaaaatatacccataagggccatgttttcactcatctttaactatgcccttgtcatagcataaagtgaaaatgtaattgttcatataggattgctgaaggtgagggatgaaatagttgatgatctctttacatgtattttctatgtgtcctttctaggaatgactaaaaagacttatgtggaatctatacttgaaggtataaaacagtccaaacaagaaaacttggacattgatgttaggtragaagattgtaccttagtagttaacatttacaaaaccagaatgtgaatttttactgttttgatcatgggtgtaatggattttttaaaattaatcattcattgatttatacaatagaaaaataaaatcaaggaccctgttgtttaaagtgagaacacaattctgagtttattcataaggcaataaaattctgagtatttttacatgagtaaagtatggtgttcctttgccattaagctaaaatgaacttcttactgtggcctacaakgtcccacatgatctggctgcctctgttacttcagcagctcatctagaccactcctcctcccttacacgtgggcctgctgtctgttcctaaaataagcaaaaaagactgttccccttcagcacctttgtttagtattccccagaacacatttctaccagattcctgcccagctggctggcttcttctcattattcagatctcaattggctgttacttcctcagaggggccttcctttaccactctgtctaaagtgccctactaatcctctagtcacccatctatttcctttatggcattatttgtaacaagattaggaattatcttgtgttagtttgtatatatgcccacccactagggtgtaagtgtagtgaagccaaggaccttgttttttgattcaccactacatctttagtacttaccacaaagtaggtacatagtatgggctcagtaaagccctaaatgaagaaagaaaaaaagctagctgtatagtttcaggctataagactctaaaaattaagcttaagtaataaccccaataaaaaaccaagcagaagacaatagaatgcagagaagaagacatacaaagagctggtagacatatagaaatacagagaaaactacttaattcattaatcatatattacaatactgtttcagtaggctaaaaaaagtaatagccagtgtttgtaagttacacactgctggtaagcatatgtaattaataaaacctctttaaatcctgcactggtacacaggtaaggggggaaaaacctctctaaagagcaatatatgtcaagatttataaaaaagtttttccctctgacacagtaattctgtgctagaaatgcatcccaggaaatagattgatttatgcataagattccttattataatgttwtttataacaaaaattagaaaatagcttaaaatatccagcattcagaggataattacattatggtatgctcatatgatttatactattttctaacattattttaatggcatgggaagttgctaagtgaaaaaaaaagatacagcattttatatgtagttgatctaaattttgtaaataaataaatgaacaaatgctaaaggaatttatttygtcaataaatagtaaactcataactgctttaaaaaattataggggttctctgggtattcaagaaatattaacaggccaagcacagtggctcatgcctgtaatcccagaactttgggaggccaacatgggcagatcacctgaggtcaggagttggagaccaccctggccaacatgatgaaactccatctctactaaaaatacaaaaattagccaggtgtggtggcaggcacctgtaatctcagctactcagaaggctgaggcagaattgcttgaacccgggaggtggaggttgcagtgagctgagatcgygccatttcactccagcctgggtgacaagaatgaaattctgtctcaaaaaaaaaaaaaaaagaaatattaacagagattctctgggtattcaagtcttatagaattccagctgatatttgaggaatgaacttttatcagatatttgatacattttagaaagagaatatttctaattttgtaaccccctaatgaaataatggatctcaccctcctaagaacacaccaccaccagtttactcttgccaaaaaatggaacctgatctgcctctggactagacaggaaatgtaagaaataggacaacatgttaaaggctgggcatggtggttcacgcctgtaatcccagcactttgggaggctgaggcgggcggatcatgaggtcaggagatcgagaccatcttggctaacacggtgaaactccgtctctactaaaaatacaaaaaattagccgggcgtggtggcacgtgcctataaccccagctactcgggtgactgaggcaggagaatcgcttggacccgggaggcagagattgtagtgagcccgagattgcaccattgcactccagcctgggcgacagagtgagattccatctcaaaaaaaaaaaaaaaaagataggacaacatgttaacaacacaggatacaatcaacaaaatccagaccatggaaaactttgtaggacaaacaacttggtttcttcaacaaataagttacaagaaaagcagggtgggaggtgggaggagaggaaagagtggttgtagattaagagaggcttagaagatacattgacttacacaaagtgtggaccttgtttggatcctgaatcaaacaaactgaagaaacaaatacaggaacaaaaaaacctcgaaagacaactgtaaatctgaacagtgactggatgcttgatgctawttaggaattcatgtctcagtccgtatgacaaagtaaaatgtcatgttgtctagattcagtcaggctatacttttcctagtgagatgtattacacgtagtctgccatctctgtctggcygtactcagaattgtctttttcatctgtgtcatattagttttcaactctgtctttcttacattaaaggtatttgatagcagttgacagaagaggtggccctttagtagccaaggagactgtaaaacttgccgaggagttcttcctttctactgagggtacagttcttggccttgacctcagtggagaccctactgtaagttatttttcctacgtacattttaattctaaaaggtagaatcagtgggataaggactagcttcgggcatcttgcattgcattctccagagtgtccaacagacactccattctgtggatgaaggcctgttctgccctggatgaccagaatgcctagagcagctctcatccaaggttctgtgaaacaattaagtaccctaaaagaaaaaaaaagagttgcctgactatatgactattttctccattcttctaaagatggtgcacaactagtcccagactatatgcactataatgtaattcattacatacaatggatggatgtcttagggtattagggcttaactgtctcatagatagttgagaaatgttgacttgagcttcttgaatgtcagattcaagcagaaatcttgatattcggggctggataatttgttgtggggctgccccatgcattgtaggatgtttagcagcatccttggcctctacccactagatgccagtagcactctcccagatatgacaaccaaaaatgtctccagacattgccaagtgtcccctggggggcagaattgctcctggttgaaaacagctgaataagagagtcccatgaaattgattcttatggctttgtccaaacctggagtattctgcccttctttttatccacctgtttaacggaagtgttttgagtaatcatgagagttcctgagtcaagtgagtgagttctccttagctctggatatctaggtgtccttccaggcataaaatttggtgactactatatccagcttagctgattgacctcagtttactgatactagacaagattctcgagggcaggaactgtgcctttgccagctttgtattcagtgaagtggctcgcacattgtaggtgctttataaacaagatgtgcaaatgaattaatctaccattatttttttctgccattatgttgtttattggaatggagtactcagttcctcagttttcccagaattctcatgcatccttattttaacttttatctttaaggtaggacaagcaaaagacttcttggaacctcttttagaagctaagaaagcaggtctgaagttagcattgcatctttcagaggtaaataatattgtcttaggctagaagggacagattgtaatagaaaataatagggtcatttgtaagtgactaggaataaaccgggattggaaaaacattttttaaaaagggaaagtagaaatatttttacatctaaatttaaaaatacatgacttgcttcagtctctrctgttactgtttttatccttttgtggttcctgggagtggctgttgactcaaatgccagctgtgtcattaaaagcagtttaatgacgtcttgctagagaaaatgcatgaatttccaacatcagtcttgtcattggcaagctgactctaagaaaagcaccaatttatctcacctgtcctcatagtagaagggacctgattgtatcacatccactggcagtaaaggaagcagctcgtcatttttcaaagcccagcaaagaggtccagtgcccctcatcagccccaagctcactgttagcatgaacgtagtracagataattgctgggaagtagtcactttcttaagcacatccttatgaggcaaaccccttttgagggactttgctgcaattttccccattttataaatggatgtattttttacctcagtacttctagctatttaattatttcttaaatgcagaaaataatacttagtctacttayctcacagttattgtattaaaggggtaatgtataaaggttgagtaacatcatgatttaaagattagggaaaaaaatcagaaccccttgccagtacttgtatctttcatgtctataagcagaaggtcagtaatctagtggcaggacttaaaatctagaatctatgtttccacactcttaactcaaaagacctttcatccacaggacatcctatggctgacctaactgatgtgtgatagaaaccattggtcattataagggaatagcatgtgtgacagtgaccagttatctctggccttgtgtgcaacatcagaacttgttctttaccttagtttctgttgcttttatcatccagtccattggatataaaagatttcatttaaaaatgttctgagcatttgtgttttgggctatctaggagataaagagcacagccagacattttcatggtgattgtggtatgtacatagccagccttgtcagaatcaaacatgatgagcacactatgtgaggaaagtaactgggccctggagtcagattgagttaggtttcacgcttatctctaccattcactagctctatgaccttggacaactttttttaaaaaatcccttatatttttaactataagagttatgtatacctgaaaaaaatccaagtgtcaagaaggaaaataattaaaaattaaaagcccaatttctatttgttttgctccccagagttaatactattaacagttttgtgtttatagtttttcagaactttttataatatatatgaacacatgtctataacggaacacacatatacatatggagttgtgaagttttattttttgaaaattacttaatttttctcagctttaatttcttcatcttaatactttttaagattcttgtgaggccttaaatcatttgtgtgaaaaggcacaaagtaggttcttaataagtgtttattattatcattgaaatgaatctagaagaatattgaggaaagaatgagaagataaaaggcaaagagctaggaaggcagaagtagttcagttttccaaaaggtctgcattaagtactacttagaggggcagggtacctagctatagaaaaaaatactcttaagaaccactgaaagaggccattgatcccctttcctcccctttctttagattccaaaccaaaaaaaagaaacacaaatactcctggatctgcttcctgacagaatcgggcatggaacatttctcaactccggtgagggaggatccctggatctggtggactttgtgaggcaacatcggataccactgggtaaggcttggagtttcaggtcttccagatgactctctgtctctcccccaatccccaggttgcctggggattacagagaagtactgttctaaaagtacgaatgtcatctagctattaaaagatggagtgtgtgctttctgagccttatttaaaacagaaagctttagcttccattagaatataagctctatgagagcagggcccctgcttgtcttattcgttgttacattctccaatgcttggaactcaataagaattttttaaaggaataaagggtcatctagaattttaaaatgactttaacaaaattgacatgtgttatgaaaatatgtaacattatttaaaaattaaacatggaaaatcccaagtatattttcacatgtctgttgatcattacacacttgattgtctatgtgtttatgaagtgcctactttgttgtcattgctgtcgatagagcagtacacaaaacaggcaagatttctttcccaagaaactcatattctagcagagggaagacagtaaacaaatatacaagaaagtatcagtgttctgtgaagaaaattaaacaggctgatatagtagtgattgtataaccacttttgattggatggttaggaaaggcctttctaaagaaggaaaaagtggttggctgcaaactattttacagaatgatcaatttgctatatttaccaatttataaaaatgcttgtgtgagtatgttttaactatagagttttcagcaattcataatgggctagatttgctaaggaaaattttaaatatccacaaaagtggagagaatgggaaccactggcatagtgatcttacttggtgtggtggcctagctctgctcccaacagagggggcagcttgggtttgtcatccgttaaactgagtgagcctgtgttgaggctgccttactcaagtgagcagataccatcaatcaagtcagtaaggtattttactctggctggggagcctggtaatatttccaggaaggaatttgttaataataggagtcactcttttttttggggggcgggggacggagtcgctctgtcacccaggctggagtgcagtggcgcgatagctcactgcaagctccacatcctgggttcacgacattctccttccccagcctcctgagtagctgggacaacaggcgcctgccaccacgcccagctaatttttttttttttttttgtatttttttagtagagatggggtttcactgtgttagccaggatggtctcgatctcctgacctcatcatccacccaccttggcctcccaaattgctgggattacaggcgtgagtcaccatgcccggccaatagtaggagtcattcttaagatggacttaacttacctagaagcagaaggaggtgaatggatgattatctgggtaaaagcgtttaggggttcttagaagccatggcaaagtctctgctcattcttagctctttataatgctctcacacctggtgctacagttttcttacctttgttttggcttccaccattagaccaggagggattgcagtagcttttcaaaaaacccttctgctcctatcattgataattctctgcttttttcatcatgacattcctctttcctctctattttggtcaaagaaggagaagtgcatggctgtaaaagggatattaattccttgcctggtacctctgttgccataagttgcaccacatgcttcctgtacaactacagtaattgaactacaaattttcacacgtaaggaaaggtcgactttgtaaactaataaactactttaaattagcaaaatttggaaatatttctcgtgtctacttggtgaacactgaatgagttcacttatttgcttttaataagaggtttttttccccttttcatctagaactctgtttgacctcaaacgtcaaaagtcagacagttccatcttatgaccagcaccatttcggattctggtacagcattgcccatccttctgtgatctgtgtaaggtgttccgtgtgaagtattttgctcctttttgctccctgagttgcattaattcagatgttcactatctagctgactgccttgcatgcctgaggataatgcccaagtagaggagttagaagggaccggggtgtggctgagtatggtggcgcacacctgtaatcccagctactcgggagactaaggcaggagaatcacttgaacccaggaggaggaggttgcagtgagcagagatcatgccattgcactccatcttgggcaacaagagtgaaactccatctcacaaagcaaaaaaaaaaagggactgggacatgagaggctacagagggccagggtgactctggtttggctctctagcaaaaggtacttgagaggacttaaaaacaaacaaaaaaactgatgctctgcacccatcccatgagattctgttttatttgatctggggtgagtcctgggcagagataggctttaaaagctccttaggtaattttaatatccagccagagttgaaacactgctctggtatcttttcttaagtataaataaatctgtttagttacagctatgcatagataaatttgtaggcccttgtttagactcttgaaagaagcatagtaaataggaaaatagactctaaacaaaaagatggttgtttttgraaaatccttcctttttcattttgaaacattcttgtttacgttggcagactgatgataagggtgtttttgcaacacacctttctcaagagtaccagctggcagctgaaacatttaatttgacccagtctcaggtgtgggatctgtcttatgaatccatcaactacatctttgcttctgacagcaccagatctgaactgaggaagaaatggaatcacctgaagcccagagtgttacatatttaagctataatgaggtgaactacttctgagtatgtgtttcaatcaagttcctgccatatcccacttagtaaaacagtccaccactcctttgaagcatagcaaccaagttccttgggctctatcaccagcaccttacacatggcaggtactcagtaaatacgtgtcttcaactgactcacaagctctcaggtgcttactgggtgggacttgactgttgttgctaattaaatccccattccaccagtgattmttgtgactcagcagtccttccctattagtgatcataaaatttcagggaaatcgaagtttctcatcaggaaatgttttggaattactagtataaagttaggaaagtggggaaattaggttactgccgagacctttaagccttctaaacagctttatattttattgtgcatactttaatcagactcccttcactcgctttaagtttttaaaagtattccccagccggatgtgatggctcatgcctgtaatcccagcactttgggaagccaaagtgggcagattgcttgatcctaggagttcagtagcagcctaggcaacatggagaaaccctgtctctacaaaaacaaaaaaacaaaaaaccggaaattagtcaggcacggtggtacacacctgtagtcccagccaccagggaggctaaggtgggaggagacctgatcccagggatgtttgaggctgcagtgagctgtgatgctacagcactccagcctgggcaacagagtgaaaccctgtttcaagaaaaagaaaagtattctccaagatcccaagaccattgacaccaggccacattgtataccagggatttatgtgaatgcctagggatgaccgtagtgacagataaagctaggtgctgagatctggttttgccctctttatgattgtcccatcggtactagaaagtgaagtcattgctccaattttggaagaggagagaataactggctgaggggtgagaaagacagaaatagctgcagctctcttttttttttttttcaacaaaggctctcactctgttccccaggctggagtgcagtgacatgatcacagatcactgcagctttcagttttaaaacagcttctattacattttctttgtggaagctgtatttctaccttagtactcactttctgcttggtctgaaagatacctctagtagtggcaacattgtgttaagtagagttcattgggtctcttgtaaccctacccctacataatggaccactggtgcaggcttacataaacacacatactgtggccacttcagctgaagacaagggacaaactaagatagttctgaaaggtaaaaaaamaaacaaacaaaaaacaaaaacaaaattattagataccaagttatgcttgaattgctttgctctttagaatgtgtgtttttccctggtatcagaagaagttaaggctgatgacacccctaatttaaattactaaggatttctgataggttttctgtctttctgtgatatcgtaaagtatttatttggtctttgaccctgtttcctggcatactgctcctaaaatccttagagtctccagagtgatggctttttgtatctaatgagttgactgctggctggcagcccctaggggctggtcactggaaagacaaatgcatgattagagttgggactttcagtcctcccccaaactcttgggagaagggctgaaggttaagttgatcaccagtgaccagtggtaatcataccttcataatgaagcctccataaaactccagaagaacagattttggagcatttccaggtaactgaacatatggaggtccctagagggtgctgtacctgaagagggtagagggtataggagctccctgtcccttcccacatgccttgctctatccatttcttcatctctatcctttgtactgtcctttataataaaccagtgaacctaagtgtttccctgagttctgtgagctttactagcaaattaaactcaaggaggggtcatgggaaccctgatttataggtttggtcagaagcacaggtaaaaccacctggggtttgaacttggcactggaagtgggcagcagtcttgtgggactgggccctcaatctgtgggatcaaatgccatctctaggggatagcatgggaaactggaggacacctagctggtatctgctgcaaaattgattgcttgcttgrtggtggggaaaaaactccacacatttggtcagagaagttttctgtctttattgtggtgtgagagcagaggaaaaaagtttgttttttccgctcagactttgttttaaggaacaggggagagggaagttctgtggtttttgaagttcttagatacgtgtgtgtagctttgtgtggcattatatatagcattatattattttctacccttatctactcatacagaaattgcacagtaaaaacatcaaagtttattcataaaatgtggatctattgcagtcactaaaaatgttgcagaacagattttaatgactgaaagtgttcatgataatatattcaatgaaaatatggttataaagttttatagtcctttttttgtttaatatctatacaaaagctattgaagtgtatgattttaatttattagccttatcatgaaattcttttcacactataaaagtcatgctagtcttaagtgagggtagggatggcataagttttttttgtttgaggttctaaaatttatgtggattggctgataaagagcatttatgaaaaactacagctaacatcagatttaatggtgaaatattgaattaaaaaaaaataaacacatgggccaggtgtcatggctcacacctgtaatcctagcactttgggaggctgaggcaagaggatcctggagttccagactagtctgggcaacatagggaaaccccgtctgcaaaaaaatattttttaaaaaactaagcgtggtggcccatgcctgtagtcccagctattcaggagactgaagtggaaggatcacttgagcctgggagttcgaggctgcagtgagctgagattgtaccactgcactccagtctgggcaacagagtgagtctgtctcaaaaaaacaacaaaacagactggagaacatagggagaccccattgctacaaaaaaaaaacatcctagccaggtgtggtggcacatgccagtgttcccagctactcaacaagctgaggtaggaggatggcttgggcccaggaagtcaaggctgtagtgagccatgatcagaccactgtactccagtctgggcgacagagtgagaccctgtttcaaaaaaaaaaaaaagtgtatatacacacacattcacatacatagagaatgaaaagcaaatgggcaaaatataaatagttggtgaatccaggtatacaggagttccttgtactcttggaactttttctgtaagtttgaaattatatcaagattaaaagttaaaaaaactttatacagtgtatatagattggaatagaccctctgaaaccttatttcctggattccttcagtgatctagcgttttggaaaatacacctgtcccctactgttaataccaggtaaccctgtacatgcgtaccatttgcatcttcaaagccccatcccaggcttaccttacctggtcaccaacatagctgctatttccactctctctgttgctaagaccatatatagcttgtgtcttatctgtacctcaaatgaacccagaggtgaagtgttatgggactgacctggaatgcagcttcattttgcctacactagttccacatcaagaccactaagttcattagaatttggcccagtctctgtaagtgttgcttctgcatttatctgttaacaactctcaaatgccaactttgggcatccagagatatgtgaggcctaagaaatattcaggtgctcggtgactcacagcatgagttattggaatatagacctcactgtgtagaatgatgtgagtgtctttggtttctgtactatatttaagaaagatgtcaataaaatatttgtatattaaattatacttacataatttgaggagctcactaattatggaagactttaaaattacttccctgatttatctattgggttatacaagttgaactgagtcacctgggaatcaatgtgtttttttttttttttaatgttcttttattttgaccgcagcgaagttctgctctccagagcctttttgagctctaaggtacattggacttctatttctagtctttaacctgacttctagttgttccaaagttttgtttctaaaagagtaccgtcttgggtgcggtaggaaaggaataatttaagctcttaaaaaatacacacacacacacacctggtacttaaagcaccatggtttcagagaattctacataacattttatatgtcaaaattttgagacatgcatgtcattacatagctatttcagtgtataggagtaaagtcttcattttggattctgaattgaataatggggaaagaactgatctatctttacaatcttaactcatcttccctttcttacctggtcaccgtaaaaatagtgctatacaggctgggcgccacccggtggctcacgcctgtaatcccagcactttgggaggccgaggcaggcggatcacgaggtcaggagatagcgaccatcctcaccaacacggtgaaaccccgtctctactaaaaatacaaaaaagtagccgggcatggtggcgggtgcctgtagtcccagctactcgggaggctgaggcagcagaatggcgtgaacctgggaaatggagcttgcagtgagctgagatcgtgccactgcactccagcctgggtgacagagcgagactccgtctcaaaaaaaaaaaaaaaaaaagtagtgtaaaatagtgctatactacattgacaagactcagagtctacactcagattacaataaatgagaaatggcaaaaacatatgttacattctatgcattggccatagagaacaaacttaggaaaagtgatagtatggggaaaaagaaaagtaatggcactaaggaaannnnnnnnnnnnnnnnnnnnnnnnnnnnnnnnnnnnnnnnnnnnnnnnnnnnnnnnnnnnnnnnnnnnnnnnnnnnnnnnnnnnnnnnnnnnnnnnnnnnnnnnnnnnnnnnnnnnnnnnnnnnnnnnnnnnnnnnnnnnnnnnnnnnnnnnnnnnnnnnnnnnnnnnnnnnnnnnnnnnnnnnnnnnnnnnnnnnnnnnnnnnnnnnnnnnnnnnnnnnnnnnnnnnnnnnnnnnnnnnnnnnnnnnnnnnnnnnnnnnnnnnnnnnnnnnnnnnnnnnnnnnnnnnnnnnnnnnnnnnnnnnnnnnnnnnnnnnnnnnnnnnnnnnnnnnnnnnnnnnnnnnnnnnnnnnnnnnnnnnnnnnnnnnnnnnnnnnnnnnnnnnnnnnnnnnnnnnnnnnnnnnnnnnnnnncctgtaatcctagcactttggggggctgaggcaggaggatcacttgaagctgggagttcaagaccagcctggacaacgtagacccctcatcaatacaaaactttaaaaaattagctgagtatagtggctcatgcctgtagtctcatctattggggaggctggggatcacttgagcccaggaatttgaagctgcagtgacctatgatggcaccactgcactccagcctgggcaacagagtgagatcctatctctaaaaaataaataaaaatttaaaaaataagactctgcatgcccagttatcttgggtcctaatttattgtggatatggatagaggtacaaaggaaggatttgcattctaatttcccttttaccacaatctgacttattcctctttctagaatataaagattcagataagcatacttctagtaaacccacacaaggagttaaaaaaagaaagattggtcttttcctgccctccataacttgatcgtaatttgtgtatatatatatacacacacacataaacacttcaagaaacaccaggcactttatagacatgatttttattaatatggtatccctgagagacagattaggtgtaaacattattttgctttacagaaagggaaatggaggcaggttaacttacaagacatctggaaccagaatatctgttgataccacaaccaatgcttttcccacgagactatacatagatatactaaagacaatacttttttttttttttgacattacagcacacttcctaaatcatctgagatcctgaggcactgcttcagactgktgtttcttgtagcttcctgtctgcttaggcaacataacagaagtaccatcttcccttaattcctaataaatattagatttttttgtactaagattcaacagcagaatcctaattaatctctaacacaacaagctatgaattatagaatactatatcttcctactgctctccctgatcttattccagccacagaattctaattgaatgtgaaacggctacttatcccagtccttggccatctggccatgtttatctttcttctcacctgctcatcaaaatatcttcatcagatactacgatttctgacctttatctcccataggagctagtcccctaaaactgcttattctttcagtggcagtcagctgtttccttatcaatagttatagcgtagtacctgatttactatagatgatggttctaccacctcatggtctgctcctaacacccatgtttcagctaaggtgattctctctgcctgctgcacagcccatatcatactattcctcaagttctcatgctactccaagctttatctggccttccttacagtctatcctttgccctttgttccatctacacaaaacaccttgctccccctttttcccattcctcaacccacccagcactcaattttgcaactagttatggaaagttcttcctatcataatttaaccagtaaccttccctcctttgaccacttcctgcttcatgaagccttcctgaataaagagaaaaaatacctcccagatttttgttaaagcaaactaatgcattggaccacaacatttatgcatagtgttgctacctagctttctagatttctctaaaactgccgcaactatgcatgtgcacttgtttgtccatgtcagtgtcatctgctttagattgtaaggacaaggagaggacctgttgaccttgtgctatacagggctcatcatactatgagcatatgggcagttaatactattgtattataaagatgagtaattatatttgcatttaaagaactgcttttaattgtattcagttgaatgtgtatgtctagattggcagctccactggccaaagataatccatcttccctgccattagggtaaagggcctgttcgcacacagtagtccattttcccaatacacgggaatgtggcagtggcttctgcttattgcaggtaagtgcccatggagggcataacactataccaggtgtgtggaatatggacgagttcctattggcagctttaactgctctacctgtcaccacatgcagctgcgttgctctgtggaacttctggaccacaagagacagacgaaattcagatgagactggacagaaagaaaaccaacctaaatcctgtaaatgtattattctattccaacccttcttctaggactcagaagaaactaagaaatccagggttcacacttcagtataaggttttcattgtttctgcataagaacacctgttcttgacaagatgattcatagggcagaaccaagatggacattaaactctccttctttaaggtaaatgaagagggtgcctgacaaatatgtcattttgagcacaggtttaagtgagcaggaagagtcattcattttagcatttccattattgtataaagaagagctgggccgggtgcagtggctcacacctgtaatcccagcactttgggagacctaggcaggcagatcatgaggtcaattcaaaaccagcctggccaacatggtgaaaccccatctctactaaaaatgcaaaatttagcctggtatggtggcaggtggctgtaatcccagctactcaggaggctgaggcaggaaaattgtttgaacccagaaggcagaggttgcagtgagctgagatcatgccactgcactccagcctggacgacagagtgagactccatctcgaaaaaaaaaagcccggcgcagtggctcatgcctgtaatcccagcactttgggaggccgaggcaggcagatcacctgaggtcgggagtttgagaccagcctgcccaacatggagaaaccccatctctactaaaaatataaaattagctggg

SEQ ID NO: 94453 - DNA, 13734 bp, Homo sapiens
taaggctattctgtttctccaggcaagagtctccagttctctgctgggggtgtctgcttggctccagtgttctgggagccctgtaggggatggtcactagggagggacagtcgcccaccttccacaacgtgaacctgtactgcttcccccatttctggtgaagattctcccccatatccactccagtctcttatgtaggtaggtgagggggctgggggtcagaccagaaaaaagtcccctgttaaagaaaaaaaattattcaatgatcctttttttttttttgagacgaagtttcgctcttgttgcccaggctggagtgcagtggcgccatctcggctcaccgcaacctctgcctccttgttcaagcgattctcctgcctcagcctcccgagtagctgggattacaggcatgtgccaccatgcccggctaattttgtatttttagtagagacaagatttcaccatgttggtcaggctggcctcgaactccctacctcaggtgatctgcccgccttggcctcccaaagtgctgggattacaggcgtgagccactgcacccagccctcaatgatactttttaaagcatgctgaggaagaacatattcaggagcatggcaggcacagggaccactgcactggggccttatagttaaggggagagactgggctctgaatacagcatgggccagtgggaatctatagccaaggggcagggtgagcatcagtgggtggaaaatccagaggaaacatcagtggtgagggggattctggttgaaccaatctaacaggattccaactgaagacaggcctcagcgtaaccagacattgcctgggggtggtgcagggaaggagcctcaagagtgatcagttatcaagggttctggctaaactgacttagcagggttctttactgaaactggattttacaaggacgtgcatatatgggcacctaggagaaggttccggagcctaaggctggaccaagcacagcatcttcatcagccctaccagccccttccctggtgcgtgctgcctctgaggtctgagtcccctgggttctgaggcaggacctggccacttctcaccacgctgctttctctgccctgtcatttaccctcctccatccttgtccattgtcttccagagctgcacttcctccatctctgctattgcctcctcccctgctccctttttcctgttgggatttcacctttaatggggcttcagcagggcagggacataagcacatgttttcattacaccatgtgacaccaaaaaaatcccacttttcctattataatttttaaaagaacaaagagattgaaggaaagtagagcccgcccacccggcggccaggcttccctgggagccagctgtgctcgaagcaccgcctccctgatgtttccagccctctcctccctggcgctgcaggacagacgggatattctcctcrttcatccgggcgggggccatcacctccgacaccaacaagaagtggtacatgttcgatgggccggtggatgccatctggattgagaacatgaacacggtgctggatgacaacaagaagctgtgcctcagctctggggagatcatcaagctcacagaggtgcacctacctgtccacctgcccactctcctccaaggctgggtgggcctggaggctgcatcatgctggccaaactctgccccctcacccctttctctcagggccatgggtccatctcaggctgtcaccctgactcagcaagagccctcctgctagcaggagcttaggctcagctcctagtgcccctccctgagctcccacacctcagggtgtcccgcacagttgctcagagcaccctttacacagaccctctttcttttgtgctcgagcccaccaggatgcctgtcccactgctccccggctgatgatgcctcttgcctcccaggcccaatttcagccatgttgccccagtcaggtcaggtggggtcaggtgtgcacctggccctggcagtatgcccggggtctgggagatggatggcatagacaccacggggatctgtctggtgtgtgaggagcagttgtcagagaaagagggatatggcctgggcacaagagcatctcaggggtctacactgagtccagctcttgaatccttctaaaagcaaatacctggcagtcaatgtggacctgtgtctatgtgcacaggggtggagggctctggagcaaaatacacagttcccatcagatgtgcccaggcctccagggaccccaaaatgctctgaccccagtctggtcagcgaacctcaggaatctcctgacttggggtcctcctcagggctccagggagagccacgttatcagctgaggacccagcggttcctgtcccacccagcactgcccctgccccacagcctgcccacaccgcccacttacaggatgtgcagcccctccccgcagccctgcagccctttctccaggcctgaggactggcagccagcccactcatttggttcgtcttggcaccaggcaatgaccatgatgttsgaggtgcaagacctggcggtggcttcmccagctacagtctcccgctgtggcatggtgtacctggagcccagcatcctggggctcatgcccttcatcgagtgctggctgaggaagctgcctcccttgctgaagccctatgaggagcatttcaaggccctctttgtcagcttcctggaggtgagtgaggccacgggtatgtctgaccctggcagggcagcagggcactgtggctgccagccatgagaactgggtgcctactccctgcaggaatccatctccttcgttcggtcctcagtgaaggaggtgatcgcctcaaccaactgcaacctgaccatgagcctcctcaagctgctggactgcttcttcaagccctttctgcctagagaggtacagccctgagagtggggctagatgcacctggtccctctccccacactgctctccttgctctctggggcctgaaagagagaattggattggtgcaacatggtgcaacatggacaagaccacctgtccaattggctgtagagaaacaaagctgtgtagcagaggtcaagacatgcccctgccccacttcctcaggccgcttgatactgttcctgtctcagcctgatactgttcccttcatccccagggcctcaagaaaataccctctgaaaagctgagtcgcatcgtagagttgatcgagccctggttcatcttctccctgatctggagcgtgggtgccactggggacagcagtggccgcaccagtttcagccactggctaaggctcaagatggagaacgaacaggtgagagccggcggcccccagggaccaggagcctcagtcctactgggcctcacagcctgcttctcctcctggttcccggcagctgactctgcttttcccagaagaggggctggtgttcgattacaggctggaggacgcgggcatcagtggcaccaacgacagtgaggatgaagaggaggaatacaagcaggtggccgcaggccctccccagagactgcacagggagggaccactgggtggctgctgttcccgcaatgaattatggccacacagggagccgtcacattgatggccaccaggtctcaggcagcggttatttgcatcatctcatgaatcctcatggccctgtagagtggttattattgtgcttgttttccagatgtggcagagctgtacttgaacctagggctgggctaagaggggagacattcgagtacctccctttccagccatatgcactgcctcttccacattgatgcggagcccagggactggccacctcagttccacttaaaagccccattttcccagagactgggctcccgagggctggggggcaagctcttgaagcctgcttcagtgtcctcatcgctactatcagctagcaagggctccatgagctcaccctcatcccaaggtcaagaccccagcccaggaggacagaggtggaaaggcgtctgcagagacctgtccattactgtgcagcgtcctgctgggggctcccagggcacatttgggtctaacgtttaagactgtgcccagtgggatgcattggtttggccatagtgatccccccatcaggggacgtctgcaagctgggtcagggctgctgtgagtgaagggatttgtgcaggcggggacagtgttgggaagactggacctagtggcctctcagcttccagctgacaccagtgcccatggttctggcccccacatttctcgggtagcctgaaactaaacagaaaacccctttgcattctgggttgttcaattctcggagcttctcctttctgcagagactcagggcctggcagtccttagggagcccccaacctgggcagggagagccctcttatgcagttgtgctcagagtccccattcttggctgtttgtgctgggagtccccctccccatgcagaaagcagggcacaggactttccatttccgccggaagcagccctgcacctggacccgcttgccaaagcccagccgtgcagctcctggcccttctgcacttggccatggggccgcagccaggagtggggcagggaggggttccaggcccactgctgagccacctatgattccaggttgcctgggtgaagtggatggactcctcagctccattcaccatggtaccagacaccaactactgcaacatcattgtgcccaccatggacaccgtgcagatgtcccatttactggacatgctgctcaccaacaagaagcccgtgagcacccccccaggccctgcctccactgtccccaaggcctatattgggggttgaccagcctcccacatggatgcaggggcagctcctcctgtgcaccaggcccaccgcatgctcctgtgccatccccgctctgccaggtgctgtgcattgggccaacaggcacggggaagacgctcaccatctctgacaagctcctcaagaacctggcactggattacatcagccacttcctcaccttctcagcccgcacttcagccaaccagacccaggacttcattgacagcaagctggacaagaggcagggcacccctccctccttcctcacccctgcatcctcccagcctggccgatccagctgctgtcccacctctccaccaaattatgctcctgggtttgccaggaacctcccagggggagctgacagccccccaatgggcccagggttccctcacagactgctccagagccttccctgtatcaaaaattcctacaaagccagtcagcgagtgggtgctcgccctggctgtgcccttggacagggccctgggtctgtctgtgagaagcctgttgtccatctgcctgggaggcgagactcactttgagggagctcagactcaggtcagcctgtcccagctgtcccaggacactcagaacaaggatgagggtgggtcaaggcatctagcaatttggaggaggctaaaatttagcaagggcttcccagaggcaaagctgccacccgttcgcccctggattctcagaggacctggtgcctgtgggtgctgggctcacacagcccctcccctcaggcggaagggtgtgtttggaccacctctggggcgcaactttatcttcttcatcgatgacctgaacatgccggccctggagacctacggtgcacagccacccatcgagctgttgcgccagtggatggaccayggcggctggtacgaccgcaagatcattggtgagtgtggccggcctggctcacagggcaagggctacgcgtgctgtgcaggggcacaggaggcacagcactgaaggcctacaatactttaaggcacccacaaaaatgttttaatttctcttaaaattaaaggggaggaggggggccggctgggggaggggcggagagacgccgccgccacggctgccgcagcctctggaagcctggaaaaggggaagcgagagcaagtgaatgtctcagtccccaggtggcggtggtggccgcgggggcgcgacggcggggcgggggcgctgctgctgcgggggcaggaagcggcaagggcggtggcggcccgctccagccrtgccgaataaaacaagaaggagaaagaatcaccaaaagcagggaagagtggaaaaagttcaaaagaaggacaagacacagtagaatcagagcaaatttccgtcaggaaaaacagccttgttgctgtcccgtctacagtgtctgctaaaataaaagtacccgtctctcagcccatagtgaagaaagacaaacagcaaaattcttcaaggtttagcgcaagcagtaatagagaacttcaaaaactaccatccttaaaagatgttcctcctgctgatcaaaagaagttttttatccagaagttatgtcagtgttgcgtcctttttgactttgtttctgatccactaagtgaactaaagtagaaggaattaaaacgagctgctttaagtgaaatggtagaatatatcacccataattggaatgtgatcacagagcctgtttacccagaagtagtccatatgtttgcagttaacatgtttcgaatattaccaccttcctccaatcctacgggagcagaatttgacycagaggaagatgaaccaacgttagaagcaggctggcttcatctacacttatttatgaatttttcttaagatttttagagtctgcagatttccaatctaatatagcgaagaaatatattgatcagaagtttgtattgcagcttttaaagctctttgacagtgaagatcctcaggagagagattttcttaaaaccacccttcacagaatctatgggaaattcctaggcttgagagcttacatcagaaaacagataaataatatattttataggtttatttatgaaacagagcatcataatggcatagcagagttactggaaatattgggaagtataattaatggatttgycttaccactaaaagaagaacacaagattttcttattgaaggtgttactacctttgcacaaagtgaaatctcttgagtgtctaccacccccagctggcatactgtggagtgcagtttttagaaaaggacagcacccccacagaaccagtggtgatgacacttctcaaatgctggccaaagactcacagtccaaaagaagtaatgttcttaaacaaattagaagcgattttagatgtcattgaaccatcagaatttgtgaagaccatggagcccctcttccggcagttggccaaatgtgtctccagcccacacttccaggtggcagagcgagctctctattactggaataatgaatacatcatgagtttaatcagtgacaatgcagcgaagattctgcccatcatgtttccttccttgtaccacaactcaaagacccattggaacaagataatacatggcttgatatacaacgccctgaatctgttcatagagatggaacaaaagctgtttgatgactgtacacaacagtccaaagcagagaaactaaaagagaagctaaaaatggaagtacgagaagaagcatgggttaaaatagaaaatctagccaaagccaatccccaggtactaaaaacgagagtgacatgaaaacgtccagggttacttgaaatgtttttataagataggactatgtcttcaccatgggggcggggggtggggctcgatttcactaacgttgtatatgaaaatgtctgcaataaaaagtacttttgaactttgtaaaaaaaaaaaaagttaaaggagaggagcatgaatttttagggcaaagaaaaattttcctgtgtaatattgatgtatttgtctttattccagtactgttctaaagtataattttgaatttttgtatggagaaggggccacaaaggtcataatgcagccctggccagggcccttcctgacttcctgcccctactccaggtgccttcaagaacctagtggacatcaactttgtctgtgccatgggccccccgggtggaggcaggaacaccgtcaccccgcggctgatgcgtcacttcaactacctgtctttcgctgagatggacgaggtcagcaagaaacgcatcttctccaccatcctgggcarctggttgggtgagtattggtgggggtgagcatggacaaaggcagaagcccaggccagggaggccacaccaaggacaactgggtggccaccagaaagggtggagtggccaaaccatgaccgcaaccctgggttcacctctcactcagctgtgtgatctttggcagctcatgaatctctctgagcctgtttcttcatctgtacctaccattccaggtcgtgagggttaagtatgatattgcatgtagagcacctagcatgaagcctggcacgtggtgattgctggatgtatgatgcacacagatatgcactcactcacatacatacatacgtatacgttagtacttgcccagaaactctggggaaggcatgttacttttgtaaatcaggaaaagccacaagataggatggacggagtgtctctgagcctttatggggtttggggaaaagcttaccccaagatgctgtttcccccaccatctcacctggccagggtgagcagcaagaggtccacctaaccctgagccccgtgtttctccctccatcctctagatggactccttggagaaaaaagctaccgggagcgtgtscgtaagtgtgggcctgggcgggaatggggcactggttccaggaggagccctgggctctggttgggtgtgttgaggctgcgaccaggcgccgtggtgaaccatcctcaggttcatgcagggaccttgggccactagggtgccagagcgaaggttgacacaggcactggctgccccataggctcattcacccattcttagagcccttccatgcctgcgttagtgtccagctgatgatagatgcaaattaaatgcaaaatgaatgcataaataagggaatccaacaaactcccaccctgtgtgaagaatcagaactccagggagcaggtgtgcacaggaaagccgggagtggtttgtgcggggcaggcatcgtggtgaatctgcccgtcgtcgcggcaaggcggctgaccactgcagtccctgtccttgcccaggcctgcctcctcaccctgccttcagctgaaagaggctgtcgagaaacagctcccttttgggtctgcacccacctgcttacctgcgccctgccttccctcctgtggctgggaacggactgctgctccacagcaaagcccagcctcctcctgggcctgcctgggaatgtggcacccctcttccccgccaacaccagtgctcccttcgccactgggccttccacaaacaagccccattctccatctcaaccaccaaatgcaaaacagcctctctgggcccccttcccrcctgccccagcccgtcactctacctctctgctcaccttgatagcaaaactcctccaaagcattgtctttcccgctgcacccgccctcccctcccactttcctgtgaatgcacctctcaccctctgagagttcttgtcaccagttgccttctgtggccagaccagcggtcagcccttgttctcgccttcccaggggtcagtagtgctggccggcagacatccccttcctgccacgggcttctctcaggcctcccccatccctggctgcccattctcggctggactggggcttggtctccagcctcctctccctccaaccacactctcctgagacagtcccatcccgcctctgacggggaaaaccatctttgtgctggcaactcccaagtctacctcctcagcccagacctctcccatgaatgcctgattccacatcttccctgggatgtccacagggtatctcaggccaaacctgtccagagccaaactcccgagtaccccggtccccgcactcttcccatctcaggcaatggcagctccatccttccaggtgctcccagcaagacggggtcttggcgccatcctccatccccccttccctcaccccacagctcacctgtcaggaggtcccataggttctcccttgagaacccatcccaatcggccactgttcaccaccctgtccttgcccacccagccagtgctgtagccccgccatggtctcctggcagctgccttcacctgcctaaggtctatcttccgcttggggccacagggacccatgaaatcattccatcagtccacactcctcctctctcacccatcgcatccaggcaagagcccgggtcttgacaatggtaggcaaagccatcctcagttcgccctgcctcatcctctgatctcaccgcctcctgctcatcccctcattgctggtccttaagatgccaggcctgctcccacctccaggcctttgcccttgctgtcccctctgcctgggacaatttttctccagttatgtgaaagcttgcatctcacttctctgcttgaccccccttcctcagtgaggcctcccccagcattccgtaaaatcgcccccaagcccaactctggccctccccggacccctctcctgctgcagggctgcccgtagcccttgccacctatttgctgtctttgttacttgctaatccactcattgtcgtccttaccaacaagagtgtcagcttgagggcaaggagtgtgtctgtttgggtcactctgtgcccagtgcctgtgtcaacagacaggcccctctcctgccctttctttccattttctccacttctccgccaagtttccactgacagaatttgggttcccagcacagaattggatagttttcaaagaacaggccgataggtgtatgagtggtaaaaatgcaggctgaggggtaggcagccccgaagtgggtggtaagccctcaaggtcgggggtgtgctccaagcctccccacgcccactccggcatcttgaggcctacgtggatcatgagaccctccccaagtgtggctcagaggtggaatgttcaggtttgggcacagcctccataggacaaggcagtaatggccccgcccagcactgaccccacgagcgcccccagttccatgatgagtcccagtgctccgacaggccatgtcagcataaagatataaggggtgcagagcaggagattcttcacctcccccaagctgggggcatcygagatggggccaaagggtacgtggaatccaagcctgaaggctggggaaggggcttggtggggggcacagcacagcaaaggcaaggaggtcaggacctgcagaggcggcagagggagctcctggcatgtgacccaggccattctcctattcccccagctggggccccccacattgcccacttcacggagccccttgtggaagccaccatcatggtgtatgcaaccatcacctcccagctgctgcccactccagccaagtcccactacaccttcaacctgagggacctctccaaggtcttccaaggcatgctcatggctgacccggccaaggtcgaggtgaggaccaggcaggcaccctccccagtgcccacactgctctccgcatcctccccagccccaccaatttcaggccttcctgcccaaacaggccctgagtggggcttcctggaacatggaggtgccaggccctccagagcccagccttggtgcagctgagcccagtcttgttagttgaacccacacctggaatggtggctgagacggggatcacatgagagagccagggcaagacgagggagaaagagggcttctggtttgggccctgcatgtgagaacgcttgagggacagtgagcagggtgccctctgggaaccaaaaaccccaggtggaaggagggggaagtgtagcagggagccaggtgtcaggggcactggcaggggtgggtccaggcactaggcacggtggggggccaacatggagcttaaatttgttctgagggtgtaatgagccgtgtgggtgggcgggggacagacctgcactttggaatgggactgagcggccagtgtgtgtgtagcccaggctaaggagatggggtgagcaggacagaagctgaccctggccttgtagccacgcttgtagccaacaaagtctacagaaaaggctgggagcttccggagggcagtcctgccacccagggagatgcagggaagctgggacagaggcggcagctgagatggagagagggggcaggttcagaggagattggtgggtcatgtcagtgtggcttggtgggtggttagatgtggggtgttgggaaagtgttaggagcatcaagcatccctcccaggtttggggttaggggagcgacagggggctaaaaggtggaagtgaggtgcttgtgacaagctagcagagccagacacccagagggcacttggccagctggactcggagctgaggcatgaggaggcccaggcagcactgtgcaatccaccccatcctcagccagccagcagttgcacttgccagcagcccccacacactgtccctgggccatggtgggagagccaggctccagtcagggccccaggaactggggcccaccctcccttgcctggtggtttgagagatagctgagggcttgggggccaaggacaggcaccgatgctggggctactgcaggaccaagtgcagctgctgcgactgtggtatcacgagaactgccgcgtgttccgggaccgactggtgaaygaggaggaccgcagctggttcgaccagctcctcaagcgctgcatggagcagtgggaggtgaccttcaacaaggtctgccccttccagcccattctttacggggacttcatgtcaccaggctccgatgtcaagtcctacgagctcatcaccagtgagagtaaggtgaggggcccaggcaggcgccctgcccctggtggggtcctcttcaatctgcctccctggggcccaggccccctgcagtcaccactaacagactaccacactataaccagggggccaggacgcggggtaagacagccagctccaggagactcccggcatgcccttgctctctctgggtaccggtttcttcacttatctctgaaaaccagcctgtggtccagctgagatgggctctagacacaggggcaatcatccctccacaaggggccgggggcggggcctggggccatgggtctcagtcaggaccccagggaggcagggaagaggcctcacttggtggccccagtgctgcatggctgaagcaggcctcctgacagtttctctccacacgcatcctctcctaattccaagagctcccaccagggtcacagggtcagcacaccctggtaagccccagaaggagcaggcagggctctgacccaactctcaggcctccatgtgtccctgggtcaggcctcgtgcaggggggcctggcttcttaaggcccagcgtccccaccatgcacaggaggaacagggtatgctgtggcaggtgagctccccgtcagggagggccccagtacacggtgctctgatcagccgagcccatgattggagtcgccccaaaagtgacagcaagcaagttcctacaagggactgcccccaagccatccctagattgggctggttgagattccaaagaaagaagcattgaattacagggtaattagtccagagcatttattaggggaactcacatacaggggagagcagagatgttctagctcagtatgtgtgcaacaagggagtcatatgagttatggagttcacatgaggactgaaggatttgggtgggctggggctagcttc

SEQ ID NO: 94454 - DNA, 13072 bp, Homo sapiens
ggtgtggtgcggtcaccttccccagctaggcttaagaattcttagtcagcctaggaaatccagctagttctgtctctcaatgtgatatagaattttttactctggtcatttaattgatttacattttcctaagccaataccatgctgttgtgatttttgtgactttataacatattttgatttcttgtgactgttttgattgtggtaagactcacatcaaaagaggtgtctcctttcaaaattctcttgactattgtttagcaggtccagatagattttagaatctatctggtcaagatcctctcaaaaggatttcattttcttattttctaaacagacacacaatttccttaaccaaattggatgcttgaaggatcctttatgattcaattagaagttctgaaaactgagtcctcaggaagaaataaaaagtaataacagcaaaacacccaccatgatcgcttttctttcaaaggcttaataaacattacataatttcttcctttaaacaaccctgctagggatgttttaataaactcattttaagagtgaagaaactgaacttgggggacctttatcagctgagagactacccagctagaaaggtagtgaagcagggattacaactgaccctcaagctaaaacacttaacctctagtttctcttctctctagagcagcatttcccaaagtgctgtgcctggaccagcagcagcagaatcacctgagaatatgttagaaatgcaaattccctggcccacctggacctaacaattaataaactctgggaatgagatccagcaatctgtgttgtacaagcccttcaggtgttctgatgcaggcagtttgagaaccactgatctagaatccaaaggctgaggagtaataagagggtgcaagaaatgctgcatggaaaaaaaataaaaaataaacacagaaaagaacagcactcactgaaatgaatgagaagaaatgctacagacattcagggtttattaaatgactgctgtgttggcagtaacagccactacatggcattataagaaataaaacagaaagtgcttagctaaaaggtgtcctttattcttttcagatcagaaaagctgagaaaccattgaaccagagtgtataaaaatctaagatctttcatcccatttctctgagacttataatcaagaaatgcattagcaactcttggctaatacacaaatgcctgtccatatgaattttgatctccttcagaagccagaccataaaaacgtctgagcacctgagtgtggaagaagcttggaaaacccctgagaagaagaaacatcctgagacatcacagaaaataagaggagattgtggagaaagagcagcctacaatagcagtgcagctggaaggctgaggagacagggtgagggccaagggaatgaggaaagactgccagggtggacgctgggaaggctgggccagtagcaccatctggggtggtgaggtgagccatatgccctgtgcatttggggtctaccacagctgcctctgtgattaaaaagggaacaaaaaaataacctttttattactattttttgaattggatacatttaccattatttgcagtaacataaaatttgtccaaattttcatttagtgaaattagtgcatcaaaccagctggatttgcccatgcaaagaggacttggtgggttcaggtgttgggctctttgtaagaattatctattaattaagtgactaaaaataattagccttttggttgggtatcctgtcaggattagggataaattcttggagaaaactgactgtgaaaggcacaggcttggattgaatgcattcaaaatagtccctgggtctttcactggatagtgagatgcctgcttggcttggaaaaattcagcccacgagattttcaaaatcactctatgaacaggaagactgttactgacgcagatcttcgccatcctcttggaatttaaagcagcattttcaaggtttattattcgtattggttttaataggattcttttatgaacctttttaatgaggagtattcaattattgcttcctgaaaacattgctatgatatcagattccatgctgtgaggcctcatttggttaatgtgtatgtgatctgaatggaaaataaaagaactgttaaattgccatttctttcctttactgtatcaagctttctttctgctgatgttggtggttggtggatgtatgcaaacactccatctttctagtttgggaaagccaccggatttaaaaagaaaatgtacttaaatgtaaaaatccatataatgtgatgtttatcagataaggcctttttcagactaaaaccttctctctttcttttaacaaatcagaaaggattgggcagaagttttctaagcccgcgggatgattaattagagagggtgccactggcaaagctcaaaaatgtgaaaacaaatgtgcacatttaatatgtaaagctcaatctggagtttaaaactggatgcagcaacttgaagtatgtgcctcaaggcatggctcaaatactccgctgaagaatccaactcataaccctgaagaaaaaagtcgaattgttaatccacttttaatcaccaatcaggagaacctttgcgaatagttgataaaacagaccagcatgtgacttgagttgaaagtgttacatgccttttatgcatctttaattacagctatgaaagctctcatgagctcatgtactagtatataatatttcatttttaggaatgatgactaggaatgttcaaaacagaattaggaggttctagaataaggccatccttggcataatggttggagcagggagaacacatttatcctgacaaaatcaaaactagtcatccaccctgatatgcaatgcataataatcaaactttgaacttttatgtagatggaagcatattaatcccttatcacccaaatatgtgctacttgctaccaaacaacttcctatataatataaagtgcactcacagaagttcattaacttccacggaggcctttggtgtttcagtcttatatatgctagcaccatcctgtgagagaatgacataacaaaaattaaagaacaaataatactttctttgaacaaagactatacaggaattatatctgcagtaggtatattgatgtgaataaactatttcaagttctgaaatggcaaagcaccatgcatcagccataaagaagtagtttctggggagtgagaagagggttcaggtgttaaatttcttgtaggaattaattaattaagtgaccaaagataattagttgggtatcctgtcaacattagggataagttcttagagaaaactgactgtcaaaggcacaggcttggattatatgcattttaaatcatcactgggtctttcatttggtagtgaggtgcctgcttggcttagaaaagttcagctcacaagattgaggtagccggatatgtgccacccccatccctattcctcacctccactcatctgccccatccccattcttttcttttctttcttttttttttttttttgagatggagtttcactcttgctgcccaggctgaagtgcaatggcatggtcttggctcactgcaccctccgtctctcgggttcaagtgattctcttgcctcagcctcccaagtagctgtacaggtgcccgcaaacatgcccagctaactttatatgtttagtagagacggggtttcaccatgttggccaggctggtctcaaactcctgacctcaggtgatccgccatcttggtctcccaaagtgctgggattacaggtgtgagccactgcacccagcccatccccattctttgatcctaacagttgtcatcttctcaatcgaaggtaaagtgctataccaattcaaccacaaggtgtctcctagcctcgctccgtccttccaactagggtgccaccctccttctgtatagaatttctggctctaacgtaatataaatggcaagtactattgggttttttgctattattattgttattatggttattattgtaattgttccctgatggggttgaagaatctcaatacttcccattgtagttctctccctcctactgagctggagattacaacctcattataccaactttttcttaatcaccaaagggattctttggtatggggatatttttattaaaatatattttataacagcctgatgatttggttaatatgattatcctacttaaattgaaggagagggatctgaggccaagagatgccatgtgctctcctactgttaaaaccaagttagaatttatataccctgagtttcttgctagtagtcaagacagctataaaataaaaaaacactgccagccaaaaaatacttattctggagtaaggcaaacttatatcaataaactttccttattagtttgccagaacattgcacctcagcactcattcttcagctactaggcaattctattgccattgaaaagcctcaacaggaagggaaatgctccatcatcaagaatgtggcccagtttaaccagcctttattaaacacacaacagtaaaaaggtaccaagcccatggatgtgcaattttttcaaagatgagcaaagcttatctctgctcttaaaaactttccaagatggcctcatgttttcatttttcccagtattggagcaagtccctcaaattactcacccagtctgttaacacctggtacaagcaccctttcaggtaaataggctaagggattcctatgatccacccatcagcctctgggacactgatctttatcatattcaaatccctgagctcatcctttatttttcccactttgtctagtgacaataggagcaaccagtcaatctcattatactcattagtttgccaaaaatgttagaaagtctcacataaacagtcattcagatctttacttcctacaagtggttcagagtatcaaatggtgctattttgtatatcgctatcaccagagcacaacatgtactatcaatgctctctttactactggaaatagagttatgagaatctctaaatccaattacattacagagccaattccaaaaccccagaaccaattcagaaagctcattcttaagattctgttcctctagactccataccaaaatgtgtattagggttctccagagaacggaaccactagtgtgtgtgtgtgtgtgtgtgtgtgtgtgtttgtgtgtgtgtgtgtgtgtgtatgcacacgcatgtgtgtgaggagagagagagatttattataaagaattggctcatgcaatatgagggctgacaagtcctaagatctgcaagctaggaaagtcagcaggctcaaagagagctgagagctgatggtatagctccagtccaagtctgaaggcccaagaagcaagagagctgatggtgtaagtttcagtctcagtccaagtccaaaggcaggaggagactgatgtcccagctcaaagggagtcaagcagagagagtgaattcttccttactcagccttctgtttttattcaatcttcaactgatcggatgaggcctggggacattgtgcaggccaatcggctatactcagtttactaattcaaatgttaatcttatccagaaatactctcacaaacacacacagaaaaaatgtttaaccaaatatctgggcaccctgtgacacaaaatcaaccattacaaaagattcatccacactagtttacagtttaccaattctaccatctctgtgttctattctctgaagagcagctgagcataaattcccccaaatgttaatattacaaaaaaaaaaagttttagattgaaacgaaatcaaatcaagcaatagttttggatgccaaatatgcaagatgcatactaggcaccaacagttcttccgtgctgatgtgattatataaaaatcataaatataggctttctgctcctcccattccatagacagtcacatcttgtgcagtgccagccatgtccctgagacacgaaggttgaagtgaaggccagagtaaacrgatttggccttactgggtgcctgatcactaggacagttttaactgtagcaaagtggttattgtcaccatcagtgacctcttcattgacctcaattacatggtccacatgttccagtatgattccacccatggcaagttccacgcaccatcaaggctgagaatgggaagcttgtcatcaatggcaatcccattaccatcttccaggagcaagatcccatccaaatcaaacaaggggatgccagtgctgattatcttgtggaatccaccagcatcatcactaccttggaaaagactagggctcacttaaaggggacatgatttctcccccttctgctgatgcccccatgtttgtgatgggtgtgaatcatgagaaaaacaaaaacaacttcacaatcatcaacaatgctttctgttccaccaactgcttagcacccccagccaaggtcatccatgacaactttggcatcatggagggattcatgaccacagtccatgccatcactgccacccagaagacgaagacaacccctctcggaaactgggatgacagctatggagctccacagacatcacccctgcaattaactagtgttgccaaggcaaagtcatccccacactgaatgagaacctcactggcatggccttctgtgtccccactgccaacatgttggttgtggacctgacctgccatctaaagaaacctgccaaatatggtaacaccaagaaggtaatgaaggaggcacggaagggcccctcaagagcatcgtggtgctacactgagcaccaagttgtctcctccaactataacagtgacatcgaccttccactttcgacgttggggctggcattgtcctcagcgataactctgtcaagctcatattctgataygacaaggaatttggctacagcaacagggtggtagactttatggtacacatggcctccaaggagtaagagccccctagaccatcagccccagtgagaacacaacaagaaaacagaggccctcagctgcagcaagtccctgccacactgtcctagactatcagccccagtgagaaaacaataggaaaagaggtcctcaggggctagcaagtcgctgccacattctgtccctgacatgctgagactctcccttcaacacagtttccacaccagaccccctgaaaaatgggagaagcctagggagccccaccttgtcatgtaccatcaataaagtcccctgcactcaacaaaagaaaaaaaacataaacataatggcattttaccttcagcctgatgttttacatcctttctgtttaactacatatctactcaaataacacactgaggtagcataaatatatgcccattccaggaagtctgtacatccagttttactccagatgcattttcttatgactggattctctttctcactgttctataaactctttgagttcctcactcaattttaatcacttttagataggtattcaatatgctaaacagagatgggcaaacaccaaatgcaaaattaaataaataagtagttttatgacttttatgtatattaagtgtgtagagacattagttttttacttctagcatgaaacatctatctcattgctttacagacatgctttatttgtacactgccttaaaattggctctccagttatttttatggatttcttatctccaaacagatagtaaattcctcaaatgtcagggatcataaccttctcttcttttgaatggtgtttatgagcaaaaatgtaactgctcaataaatgttaggtgaatcatacacctttgtattcttggttgaacaaatgaaagaataaatgactgccaaatcctctgctgtctctgtcgtatctgatcttctaagggaagagatgggatagggcatctcatatctagcaataaagaagttgctccacatacagaagctgaaacaaaaattgattctgaaaaatttacatttcaaaacagtgtaaataacagtgttctcggaaatggtgttctttaaaatgctacgttattcaaatcaactctcagttattcaggagctaattattcaagggttgtaacccaagaattcaatacttatccaagtggcctcttactgaaggtgatcaaatatgaggtctctagaaagatgccacctttgtaaccctcttgaaaaaaaatttgaagacaaaaagaagaagagatataattaacaactcaggaacagaaaagtcagcataaaagaataggcagtgaacatggagatcaattaaaatcagatatccaaataattgcaaatctagttataaaactagaggtaaatgtcaaaaagaaaggtttcttaatgaaacaaagtcttagttataaaatagatctaaatcccaagatttgattaaccaaagacaagtaataagggaagaatagaagcactcttgaataaagaggtttcaaaataaactagttcactcttaattttggtaattacagaaaatattaatgaatggtttaggaaagtttacaaataacacatataaaataaaatcaggatgtataacttctaaaagatttaagaaaattaaaggaagtagttgatttgtgtttgtttatcaaatacgttttgagcagcctctgtttatcggcactgctccagtttgtgtatatacagcagtgatttgcaacctagagacccaaagggttgataatgtctcttaaagtgagtctaaaaacaactcagaaaaaaatatgttgtttataagaaatagtcataaaacaaacaaagccaaaagactaaaaagttaaaagtttatggcaaagacccatgagaccttgaaggaggggcctgcaactctttgaccagcctgctgggttgtagactttctggatgacccagccctgcccattctccagccttgccttgagtatctcttccaattagtcataaggcttaattaactccaatgactcttaaggatgtagcacattccctgggaagtacatttttacttatcagagtgactggaggtccctattaacatttaatgggttgagctagcatggtgaagaaacttccttcattccacacaactttagaatatcccactaaatattcatgtaagttaaaacatttctttgaaacttattacccaaacctgattttttttttatatttaacaaataacttttgcgaggttttaatataaatgacttctgtgttaatcaagggaagtggtatttcattttattcagaaatttaccaaatattgttcctcatgtaggaatatcaagtcatcaatagcaacctaactcatgaaatgtgagttaccaaccaacataactatgctgtgtttcattcatagtgatttgatgtttggattacaaacatctgacaacttcattataccttctagaatatctgtggtcaacaattcacacctaaaattcttattaacttgcaatatatttattgacttttgtttctttattgtatcccagttaaggcattttattgatttttttttgaaatgaagtatgtaagtacatgtgaatttcatttcaggatagtaaaaggggtactgtaaaatatttgttataaatggatttcacattggcttcccttaaaatattccaaaatgccaaactttttcccagcccagggtttccatataggtaaagttcactgccctccacccttacttcaaatcctaaagatctcaaaaccctcacttccctgtctgtaggctgacttctttggctttttacctcagctgtcccatcatggacaaaatgtcacctctgctgagaagcgttccctgcctcctctagcaattgtgtttcctctgtagccttccatattttcactttgtttctttcagagcttttatcaccaatgctaattattatgctcatttatatacttaatatctatttcccccaataaaaggaaaaccaagtctttttcattgttattgttcaccaccatatagccagggtctagtacatggcctaaaacatgatgagcgatcaataataattggtcgaatgaaggaaagctgatagaaattcaaggaaaaaacggaagaaggaaaaaatttcttaattatataggatgaatttaaacacagctcccaatcttggaggaaaccagtaggtgataaataagtgcaaaatctcaatatgattaataagattgctttcagagacaaacactaaattttttaaaaaatacatgtatttatttatttaataacttcaacttattttacatgcatggggtacatgtgcaggtttattacctgggtattttgcatgatgctgaggtttgggatacaactgataccatcacccaggtactgagcatagtacccaatagttagtttttcaacacgtatatcccttcctccctcctccttctagtagtcccagtgtatattgttgctgtctttatgtccatgagtgtttagcttccacttataagtgagaacatgtggtgtttggttttcccttcctgtatcaattcacttaggataatggcctccagcttcatccatgttgcagcaaagggcatgatttcattcttttttatagctgtatagtattccatggtatatatgtaccctgttttctttatccagtctgtttatgggcacttaggttgtttgcatgtctttgctaccatgaatagtgctgtgattaacatacaagtgcatgtgacatttggtagaacaatttatttttctttagatatatacccagtaatgggattactgggttgattggtaactctgttttaagttatttgagaaatctccaaagtactttccacagtcattgaactaatttgcatcccaccaataatgtataagcattcccttgctccacagctttgccagcatcagttgttttttttgactttttaataattgcaaaccaccatggtacatgtttacctatgtaacaatcctccatatcctgcacatgtatcctggaatttacaattaaattatatttcaaaaaattaaaattaaaattaaattaaattaaaaagccacattataaattgcaacagaagcaactaagaagtctagagaggaaggtgtggtgtctacattaatttttaacatcagcagaacttcatcatttgaggaaaacctggaggatttgaagaaagcctggaggatttgaatcttggtctttatgactcctgtggtgataacaggagaagacatagtatagaggacccctagctccagtgatggacataaatattggctgatgatgtattcttaaagtctgttttcctgcaatgatacataataagtgagtgtgctctacttcaagacaaaggtacaaacaaccatggaaatgtggggatataaacagtatgttctttgagattactgagttggcattacaagtacccttctaagtgatcagtcactagcagtggaagtcgaagagtgtgttgagctgtcgaaatttacttttgcaattgggtgaatattccactaacttttgttttttggttgcaaataataaaacccacttaattcaaaaaggacaaaggacaagtaaaagggacaaaatgttatgatgaccttgaggtatgccatggaatcaaaggcctatcaatggcattagcaaagtctaggaacatcagaggaaacccatccaaaaccaagacaacggctcttctggtctccctttctcactcttgctctcattctgtccatctatgtggtctcctcactttatctatcagcatgtgtttttatatatagtagaatgatttctattcttttgggtatatacccagcatgttggcttcctatttctcttttttttttgaaaccaatgtgactcaaaatgaccaacacaatagaaaattccttcctctcttcagaaatttgtgttactcaactaagacaactgaataaatcagctagaatttctgaatctcaactccwaattcctggaaacaagactaaattgaccccccatatttagaagtttacctctagtctgatctgctatggcccaagaggaagagttgtgtgcactgttgttaggcctgcccatgggggtgggtagtgatagtgcagctctaagggaaagagggttgtggctgggcatatgccctaaagatgcatctactaggctggagtttttttaagtaaaagactataaagttagagaatagaacaaacttgtgttcatttttatgaagaaagcctgggtgtaaaggaaaagctcccaaaccattcccagaaagctccaaatattccaaaaagaaaaaaaaaaagaaaaagaattctacatctccttttctattatttgacttttttacaagtagtcagctgagttcacctagaaaatcttttgcattactcaatgcctgaaaatagcagcagagaagaacttttcaaaataagagacttctccagtctctgaaagatatttctcagtgaatttgttctcagtttctgcttctgatgagcagttggactgttaccttgacactgattctgggaagttgtgccatttagaattctttcatatctttatatctactgtctacatattttagttgagaattaatcagacaagctcttggaattaaaatatggtccatagcatgagaaaagattatttcctcattatctgtcgatgatatctctccctcaataagttagtaggttttctgaaatgatatatagcttccaacttttgcctacatttctgaaagctagaaaaacatgttagtagctaaatccatatgttatctgtagaggtgagaccaggaaattgtgtggaataatgtggcaattgatatcagcttcagccaaaagtaacttgcaaaataaggtgagtggggaagaaaagaactaataagcactgacaataaaaaaaattatatagcatattttttagtcctaattttgtagctatcagaacttttataattaagtcaaacaacattcttctattgaaaaactttttttgaacaactcttgtggttacaaatgttttcttagaaataagcctgc

SEQ ID NO: 94455 - DNA, 57631 bp, Homo sapiens
tcatggtgaggcggctgtcagcagcaatagtcctggggatgggcctatctgtacaagggaccacctgtatgtagcaggaatgtacctacctctatgtagcctacatcccccaagaaccctaacagcaaacggctgccttccagccattagattaccagggagtggggatgctgtagccccactttggaggcacagcttactgaaagtgaaagtacaagggaactggtggagagagaaaaaactttatgacttcaaagctctttcacaagttgggcgcggtggctcacgcctgtaatcccagcactttgggagaccgaggtggcagaattgcttgagccctggagtttgagaccaccctgggcaacatagcaagatcttgtcagtacaaatagtaaaaaaattagccaggtgggtggatcacgaggtcaggagatccagaacatcctggctaacatggtgaaactctgtctctactagaaaaaaaatacaaaaaattagccgggcgtggtggcaggcgcctgtagtcccagctactcacaaggctgaggcaggagaatggcacgaacccaggaggtggaggttgcagtcagccgagatcgcgccactgcactccagcctgggtgacagagcaagactccgtctcaaaaaaaacaaaaatggccgggcgcggtggctcacgcctgtaatcccagcactttgagaggccgaggcaggcggatcacgaggtcaggagatcaagactatcttggctaacatggtgaaaccccgtctctactaaaaatacaaaaaataatccgggcatggtggcaggcgcctgtagtcccagttactcggaaagctgaggcaggagaatggcgtgaacccaggaggcggagcttgcagtgagccaagatcatgccactgcactccagcctgggcgacagagaccttgtgtcaacaaacaaacaaaaacaaaaacagctctttcacagatattacgatttccctgagaggtaggctggggagaagtgacaggctttggtgagagtgctgatcactggcatggtgctgtagtgccacaaactgctgtgtctagaaaaatgagaaccatcttattcacaatattatcattattatcaaaaagtctctggaattccagacccaaccgtaaccttaattcacttttgcctgagttcagttccttttctgtaaaaaagcagtatctaccctgcctactcaactgaggtgttgtgaggatcaaaagctatactgtatttggaagcaatctataaaatggaaaacgttacgccacgtgcggtggctcacacctgtaatcccagcactttgggaggccaaggtgggtggatcacctgaggtcaggagttgaagaccagcctggccaatatggtgaaaccccatctctactaaaatacaaaaattagccgggaatgatggcgagtgcctgtaatcccagctactcagaaggctgagatgggagaatcgcttgaacctgggaaatagtggttgcagtaagccgaaattgcgccactgcactccagcctgggtggctgagggagactccgtctaaaaaaaaaaaaaaaggaaaaccttgaaggaacagaatggataatattacttttaagttgtttagctgaaagttttcttctttttttctggttctgtccagactggagtgcagtgggacaatcacttaagcagccttaaactccgaggctcaagtaatcctcctgcctcagcctcccaagtaactgggactacagttgcacaccagcatgcccagttaatttctttttttttcttttttgagacagagtctcactctgtcgcccaggctggagcgctgtggcgcaatctcagctcactgcagcttccacctcccaagttcctgcaattctcctgcctcagcctcctgggtaacctggattacaggtaagtgccaccacacccagctaatgtttgtatttttaatagagacagggtttcaccatgttcctcagcctggtctcgaactcctgacctcaggtgatctgccagcctcagcctcccaaagtgctaggattacaggcatgagccaccgcgcccagctaatttctgtttttgttataaatggagtattgccatgctgcccacgctggtctcgaactcctggcctcaatctcccaaggtgttgggatggcatgagccaccatgcccagccaaagttttctccttatgaggaaaatacaatagagatgtacaaagtgaacaggagatcctgactccagctactttccaaaagacacatgaatttcccatttttgcttactaattcaccataatgaatgcatactatgtgccaagaatcaaaatgaatgacagcctatgtccttcctgaggagactatcatatgcagaattaactgcagtattgtgtaaaaggactgaatatattaactatgagtctatgaaggctgaaactattaaaagctgtatccccacattcatttgtttacccccatttatttattcaatctaaatttatatttattcgatataaattcaatatatttattcaacataaactcattgatttattcactggagggctatatgggatacagaggtagcacaaaggcagaacctcaggtttcacttactaacaggagctgtaaaggtcttgggtgccttaaatcacgctgtggctccagccactccacaggaattttttttttttttttttttttttgagacagggtctccctctctgtcacccaggctggagcgcaggcaatggtgcaatcacttggccttccaggctcaggtgttcctcccacctcagcctccggagtagctaggactacaggcatgtgccaccaaacccgactaatttttttgtatttaaaaaaaatttttgaggccgggtagggtggctcacgcctataatcccagtactttgggaggtcgaggcgggtggatcacaaggtcaggagatcaagaccatcctggctaacacggtgaaaccctgtctctactaaaaatacaacacaacaaaaaattagcggggtgtggtggcacgcacctataatcccagctacttgggaggctgaggcaggagaatcgcttgaacctgggaggcagaggttgcaatgagccaagatcaactgcactccagcctgggcaacagaaaattttcagccgggtacagtggctcacgcctgtaatcccagcactttggggggccgaggcgggtggatcacctgaggtcaggagttcgagaacagcctggccaacatggtgaaaccccatctctactaaaaatacaaaaattaggccgggcgcggtggctcacgcctgtaatcccagcactttgggaggccgaggcgggcggatcacgaggtcaggagatcgagaccatcctggctaacacggtgaaaccccgtctctactaaaaatacaaaaaattagccgggcgtggtagcgggcgcctgtagtcccagctagctactcgggaggctgaggcaggagaatggcgtgaacccgggaggcggagcttgcagtgagccgagatcgcgccactgcactccagcctgggcgacagagcgagactccgtctcaaaaaaaaaaaaaaaaaaaaaaaaattagctgggcatggtagcgggcgcctgtaatcccagctacttgggaggctgagtcaggagaattgcttgaacctgggaggcggtggctgcagcgagccgagatcatgccattgcactccagcctgggtgacaaagcgagacctgtttcaactttttttttgaggcaggtctcgctctgtcacccaggctttacacacaggtctcgctctgtcactttgggaggctgaaacaggaggattgcttgaggccaggaattcaagaccagcctgggcaacatgggaacacctgagcctgggaggtcaattttttttttaattggccaggtgtggtggtgtgcacctgcagacccagctactcgggaggctgagtccaaagggtcgcttgagcacataagtttgaggctgcagtgagctatggtcacaccaaaacattccagcctaggtaacagggtgagaccctgactcaaacaacaacaaacgtaaagacactttttcttttttttgagacggtgtttcgctcttgtagcccaggctggagtgcaatggtgcgcaacctcggctcaccgcaatctccacctcccggcttcaagcgattctcctgcctcagcctcctgagtagctgggaatacaggcatgtgccaccacacctagctaattttgtatttttagtagagacggggtttctccatgttggtcaggctggtctcgacctcctgacctcaggcgatctgcccgcctcggcctcccaaagtgctgggattacaggggtgagctaccgcgcccggccaagacacttatttaagacagccttccccttcttcttttttttttttttttttttttgagacggagtctcgctctgttgcgcaggctggagtgcagtggcgcgatctcagctcactgcaagctccgcctcccgggttcacgccattctcctgcctcagcctcccgagtagctgggactactgggactacgggcgccagtcaccacgcccggctatttttgtatatttggtagagatggggtttcaccgtgttagccaggatggtctcaatctcctgacctcgtgatctgcccacctcggcctccccaagtgctgggattacaggcgtgagccaccgcgcccggccgccttccccttcttgataaggctccccctcttttactgtctcacagcctcaagtgtttcccttcataatttccatacgcgcttcatggattgtttaatgtgcgcctcccccatcaggctgtcagttccatcccagcagcaacgactgttctgggctctttttttttttttttttttgaaacggagtctccctctgtcacccaggctggagtgcaatggtgtgatctcagctcactgcaacctccgcctgccgggttcaagcgattctcatgcctcagcctccggagtggctgagagtacaggcgcgcgccgccacgctcggctaatttttgtatttttagtaaagacggggtttcaccatgttggccaggctagtctcgaacccctgacctcaggtgatccgcccgcctcgacctcccaaagcgctgggattacaggcgtgagcctccgcgcctggccctgggctattacagcacatcctcagcatctagtacagtggctgctaaatacgtatttcgtgatcaggtatactaatcctttaacaccaagttcggaattaactcacatgcttcaaagcacaccgagaaatacaaactgttttacagaacagcttaagatgacggtctcggtgcgcctggaccggcatcagctgtttagttaattttaagaaatcaaggaatggctggcttacagcaggattgcacccagctggcccatccttcctcccgtgcccccacccgcccctaggggattaaaaccaagggagctaaaaccccaggttggcaaccgtgaggtattggtgctcagcaaatccacccgaggccgcgacactcgcagcgctcccgggggcgaacgcaaggccacactgtccagctcccgctccagcccagactgggcttctccaggccacgcggggcctgatcctggggcccactgcggctgcggagctttccccccagtctgcgggcccagccgctctcctagcaccgcagagctctccgagggcggcctacctctcctagggtcgccgtccccagctcctccctcagagtcccccgccaagggcccgctgcacctattcccgcagacgcgcagctgtaccggcctcagaccacgacctaccacaacccgccacgctccgtccaatcagagcgcgccgacggaaagtgccccgccgcgccttacctcatgagatattattggtcaaccaacatgccagtcaaactgaggacgaatccgttcattagtggattcctgggaaggcggctctaacttggctgatgcaactgcgagaaaaggtgggatggggtgcgtcacatgatcgagttagacccccccccgccccccccgcccccccccgcccccggctcccggaggtcgacattttggtttccataggcaaagtcctaacaccacaattgacatagttaaaaaggggagacggtaacgtgtttggtagaggttacatatcttgctatagttgtttattttagttgctgagtgatacacagccctcaaagagtctgacattgtgcccatggttacacttgtccgggggagaccttgaatttggtgtggaagaaataacatcagtagttcaggtacgattggatcagcatctggtcctcgatttgcctttggaaaaaaaaaagttaatatttataggcctgggggaggagggtgaatatatatatatacatatacatatatacatgccaggtgcggtggctcacgcctataattgcaacactttgggaggccaaggtgggaagatcacctgaacccaggagttggagaccagcctggtcaacataactagaccctgtctctacgaaaaattttttaaaaggccgggcgcggtggcccacacctgtaatcctagcactttgggaggctgaggccaacggatgacgaggtcaggagaccgagagcatcctggccaacatggtgaaaccccgtctctactaaaaacacaaaattagccgggcgcgcatctgtagtcccagccactcgggaggctgaggcaagggaatcccttgacctcgggaggcggaagttgcggtgagccgagatggcgccactgcactccagcctggctacggagcaagactccgtctcaaaaaaaaaaataaaaaataaaaattagccaggcatagtggcgcatgcttgtagtcccagctacttgggaggttgaagtgggaggatcacttgagcctaggaagttgaggctgcagtgagccctgatcgtgacactgcattccttgggcgacagagcgaggccctgtctgaaaaatatgtatgtatttatacgtgaggcattgcatcaaacatttcacatgcttatttcatttgatttttaaactgtgtatgaggtcagctggagtcccctttttacaaatgaggaaattaccttgcacaagttcacacccaatagtaagttgtggagacaggatccaaacctgtgtctatttaactccaaagcccatgctcttaaccactgcactattacctccatcatctgatatatccaaatacacgggtaataaattgtgctgctggtcataactcaagttacagacaatacagaaaaatactactttttatgcaaaaagagcatcctacacaaaaagaaggtcaagcccaaaagccagtaaaaacataaatcatttgatttactttcccacttcatagctgctcacaaatagtaatcatcaaacctaccatttattgagcacttagtatacagcaggcaccaatctaagcttttaatcctcacaaccttatcatgagttactactactatctgcttttaacagagtaaaataaggcagagagagaggttaagtaacacagctgagggcaaaaccaggagacacaagtgtttattctgatccacagtgccctaaataacatatatttagcttaaacaatctgggaaatgagtcagacttctaagccaccacacttaaaatagaaagccaaaaggtatgtatgaattgtactttcagaataaaataatacaggttgtaatctcaataatttagttctgctgccagagttgttactaggatagtaccttcattaataaaataattataaacagattaaaataattttttggcctagcgtggtgactcatgcctgtaatcccagcacttttgggaggcctaggcaggcagatcatgaggtcaggagattgagaccatcctggctaacacgacgaaaccccgtctctactaaaaaatacaaaaaaagtagccgggcgtggtggcgggcgcctgtagtcccagctactctggaggctgaggcaggagaatggcgtgaacccgggaggcggagctagcagtgagccgagatcaggccactgcactccagcctgggccgcagagcgagactttgtctcaaaataaataaataaataaataagaattttttattcacccattaagagagattgtaggccagcacagagactcacacctgtaatcccaacactttgggaggccaaggcaggaggatcaatggagcccaagtgtttgaaaccagcctaggcaacatagtgagactctgttaaaaaaaaaaaattctttttaattagctaggcgtggtggcattcgcctgtagtcccagctgctcaagaggctgaggaaggagaatcacttggagcccagaagctgaaggcttcagtgagctgagatctcgcgactgcactccagcctgggcaacaaagcaagacccttgtctctctctctttttttttcctttttttgaggcagagtttcactcttgttgcccaggctggagtgcaatggcatgatctcggctcatgtcaacatctgcctcctggctcagcctcccgagtagctgagattacaggcgccaccaccacgcccagttatttttttttcttctatttctagtagagatgagggtttcgccatgttggccaggctggtcttgaactcccgacctcaggtgattcgcctgccttggcctcccaaagtgttgggatttcaggcgtgagccatcgcgtccggcccccttgtctcttaaaacaaaaaaaagaaagaaattgtaattgaggcccaaaagtctcattctaatataattatctaatgatatttttctgtgatatttttctcttgtagatgtcaacwacatgctagaaagaatgctatcttaatgcaatgtgcaaattatgtattttaggaaactactggcaagttcttgatttactctaggctaagcaaataggcctgtaggtgggagtgagcgatatgcacatggcttgctctccagtagaacatttgttgaactccatcttggggcatgagaaagataaccaaagaactgaaatagtacaacagctgtgattgccccactaccctccagcctgggccgcagagtgaaacaacaggccaggcacagtggctcatgcctgtaatcccaacactttgggaggccgaggcgggcagatcacctgaggttgggagttcaaaatcagcctggtcaacctggtgaaaccccatctctactaaaaatacwaaaattatctgggtgtggtggcggccacctgtaatcccagctactcagaaggctgaggcagaggctgcagtgactcaagattgtgccactgcactccagcctgggagacaagagggaaactctgtctcaaaaaaattaaattaaattaaatttaaaaaataataaaaacaacaaacagaaacaggccggcgtgatggcgtatacctttaatcaccatactttgggattctgaggtgggtggatggcttgagcccaggagtttgagactagcctgagcaacatgacaaaactcaacctctacaaaaaaatacaaaaattagctgggcatggtggcatgcatctgtagtcccagctattcaggaggctgaggtgggaggatagcttgagacagggaagtaaaggatgcagtaagccatgatcgtgccactgcactccagcctgggtggcagaatgagacagtgtctcaattgaaaaaaaaaagaaagaaatggaaacaagtggaaaaaaaaaaaaactaacatagctttggaaggatgtagcgctagactcttaactctcccatggcatcttagctacttttagcatctataaaatgggtttacaatgctggcttatttggtactaagtcaaatggggatggctgaatttttttttttttttttttttttttgagacggagtctcgctctgtcgcccaggccggactgcggactgcagtggcgcaatctcggctcactgcaagctccgcttcctgggttcacgccattctcctgcctcagcctcccgagtagctgggactacaggcgcccgccaccgtgcccggctaattttttgtatttttagtagagacggggtttcaccttgttagccaggatggtctcgatctcctgacctcatgatccacccgcctcggcctcccaaagtgctgggattacaggcgtgagccaccgcgcccggccaaggctgaatttttaagaacctctaaaggaatatttcaattgagcatattataatttttttgtctaatgtacttttcagaccataaaacgctaaaggaatcacctaggatcttaaaatattgctaaattgaataggtctggggtagggcctgagagcctgaatttttttttttttttttttttttttttgagacggagtctcactctgtcgcccaggctggagtgcagtggcgcgatctctgcacactgcaagctccgcctcccgggttcacgccattctcctgcctcagccttgcgagtagctgggactacaggcgcccgctaccacgcccagctaattttttgtatttttagtagagacggggtttcacagtgttagccagaatggcctcgatctcctgacctcgtgatccacccgcctcggcctcccaaagtgctgggattacaggcgtgagccaccgtgcccggccgagagcctgcatttttaacaggcttcaggcgatatctatgctgctgagagattatacttggaataccaagggtctagattagaggatgtgcgtctgcacctatttgttcagatgcaaaatttttaaaaagtttgacccacggggggagatgctaatggctcatgattcaccaaatgagtgaccactatgtgttagtcactgaggatcaagattaaagatcttgccctgccctcatggagttcccagtctcaccaggaagccagacatttagcaggaaacaaagccctctgcgggaggcttgcgcttgtctttggcccccagagttcctggggcgcgtgcccgagcgctgtaccgtcccctcagctgattggctgacaggatttccaggcctcagccaatgaggctccggcttggccagtgccaagagcagcggttgttggagtgtaactgccatgctcagccgcgatggctggggctgccgggcgcgtccaagatygcgccctgcggcggtttcccatcaccctgcctgtgggcgacgtgagtatctgcgagggtagaagccagaccctttcctcccacgtttaggtgccttcctcgcccctactcctgggtagaggaataacaatatttctcgaggcttcggcccaaggtcttagccttgtgatctagaatccgccatctgtgaggtgggtacttcctgtgatttcaggggaaactgagactggctaggctcacgtgggartaaatgcaggaggctgaattccaatccagatgctcttattccccgaacactcttctttccacgcccgctttggaaaccaggttccttcttagccggagtctcacaaagcgcaggtgtattgggggtgaacttaggagagtctgaaaccccgatgctatttttaagtttttttgttttttgttttgttttgagacaggctggagtgcagtggcatgatcacgactcactgcagccttgaactcctgggatcaagtgatcctcccacctcagcctcaggagtagctgggactacaggctcacgccaccacgcccagctacttaaaaaaaatttttttttttttttggtagagacggggtctccctatgttgcccaggcttgcatatttatttagtagaagaaaaaacacatgctaaaatcgtgtacgggaaggataaacaccaaatttggcatagctgctgtcttcctgggatgagtatacggagattatcaattggaccttagtaattttatttattaagttttgaggtgggaatctaagtatttgttataccctttcttgtttgtctgaaatacatttttaaaagggaaacatggagccaagcacagctgcacacacctgtagtcccagctacttgggaagcagaggcaggtgaacctcttgaactcaggagttcaaggatatagtaygtgctgtaatggtgcctgtgaatagccactgcactccagcctgggcaacatagcaagaccctgtctctaatttaaaaaaaaccatgcatatggaaaataatttcagaggataaagcatactcaatccacccccacccttctagaggccctcaccaggggcagccatggttatcagttttgtgtgtatcttaagcatttttttttttttttttgagacagaggctcgctctgttgcccaggctggagtgcagtggcatgatctcagctcactgcaacctctgcctcctgggttcaagcaattctctgcctcagcctcccaagtagctgggattacaggcacccaccaccatgctcagctgatttttgtatttttagtagagacagagtttcaccatcttgaccaggctgatcttgaactcctgacctcgtgatccaccaccttggcctcccaaactgctgggattacaggcgtgagccaccgcacctggccacattttttttttttttaagaggcgatggtttcactatgttgtccaggctggcttcgaacttctgagctcaggcgatcctccaacctcagcttcaggagtagctgggactgcagacacaggccactgctccggtcttcttaggcattttccatagtgtataaaagcatatatgggagcttgggggcttttggggtgggggttcctgtttgttttgtacaagtgaacctactatatacggtcctgcaacttgggcgatgtaatttttaacctcattaaaatgttttgcaaatttcattaacctctagccctgtgaaacaatataatttatctgggaaaatatccccagggttgcttctgaattgatgagatgtaggtcatggctaccaaggtggtgtttgcctttttctttttagcacatcctcatgtgtaaggtcaaaaacaaaaaacaaaaacgtcttctccagttaaccctgtgagagtgcaggaaaaaataatcatagcaagtagaatgttctctggaactgctttaccctttctcaaaacgtttttactcttacagtactggtaaaattccacagagaacccaccatggcttgatttttgtttgtttgtttttatttatgtatttatttgagacagagtcttgctctgtcgtccaggctggagtgcagtggcatgatcttggctcactgcaacctccacctcccgggttcaagcgattctcctgcctcagcctcccaagtagctgggactacaggtgcatgccaccacacccagctaatttttgtatttttagtagagacagggtttcaccatgttggtcaggatggtctcaatctcctgacctcgtgatccacctgctttggcctcccaaagtgctgggattacaggtgcaagccaccgtgcccagtctatttatttattttttttgagacagagtttcactcgtcgcccaggctgcagtgtgatggcatgatctcggctcactgcaacctttgccttccgggttctagtgattctcctgcctcaggcttacaagtagctgggattacaggtgtgcaccaccatgcttggctaatttttgtatttttagtagagatagggtttcaccatgttggccaagctggtcttgatatcctgacctcaggtgatccacccaccttggcctcccaaagtgctgggattacaggtgtgagccattgtgcccggcctcatggcttgaaattaacttattgttgtataatattggcaaaatgaaagaggttgggattcatttttttcagattgtaggaaaatgcctagtttctttctagggaagtaacaagggaagagaagcttctttgattctagttaggagaaagcagttctttcatttaatccttattttacaactactaaaagcccaagatatttcttcctatttatttatttgtttatgaggcagagtcttactctgttgcgcagactagagtgcagtgacacaaacacygctaactgcagcctcaacctcctgggctcaagtgatcctcccacctcagcctcccaagtagctggaactgcaggcatgtgcgacgacacctggctaatttttaaatttttcttgtgtaaggataaggcctcgctatgttgttgttttcaaactcctggattcaagcgatcctcccacctccacctcccaaaatgctaggattacacatgtgagctactgtgcctggccaatcctggcactttgggaggtggaggtgggaggatcacttgagctcaggagtttgagaccagccaggacaacacagcaagatctgtctctatcttaaaaaaacaaaaggccgggtgcagtggctcacgcctgtaatcccagcactttgggaggccaaggcaggcggatcacgaggtcaggagattgagaccatcctggccaacatggtgaaacaccatctctattaaaaatagaaaaactagctgggcatggtggcgcatgcttgtaatcccagctacttgggaggctgaggcaagagaatttcttgaacccaggaggtggaggttgcagtgagccgaaatcgtgccactgcactccagcctgggcgacagagccagactcaatctcaaaaaacaaacaaaaacccaagtgctgagattacaggcatgagccaccacacctagctctatttaattattttactattttaattttatttatttttttcctagacagagttttgctctgtcacccaggctggagtgcagtggccctgtcatggctcactgcagcctagacctcctgggctcaagtgatccttccgcctcggcctccagaagtgctgggattacatgcatgagccaccgcaccgtctgttttcttcctttttaacattctcctgattctacaacgcttacataggagagctgcaattcctcctcttggggtacaaatttatgagtgcaggtgcagttttgttacatgcctaacaagattgcatagtggtcaagtggacttttaaccaaatgggttgtcagggctgattgccaacatctggacattttaaattaccaatctgaaaagggaaacagctctgtgcttgttttgcattttggtgactattggtaatggttttctgttttgatatattcaatctgttcaatctgtattagtgcctactctgccactgtgttgggcgggaatctgattttgttctttggttggagatccaagttaaccagagcttaggcattttaagataactacctcagcttgataggaaagcttgctctgcccggggttgaggggtacgggtctgagggcaacagaatcgacagcctcaagtgggcaaagggtggccaaacaggagtggcctccgacgtcactgtggcgcccgcttccggtctgcagccttgtagtggggctggagcagagcctgccgcgaacccccrgagcccacgatccctcgtgccatccctcgaatccaccagcacgagcgtcccacccgcgcctgggaccatggccactgactcatgggccctggcggtggacgagcaggaagctgcggctgagtcggtgagttggcttcagccctaaaagggtcaggggactagttctkgtcggagacttggtccctgggaaagaatgtttcccaggttgattagaggctggatggggtggcggggaggatagggatggagcctggaccctgagctggctttgtttacgcagccgcctccgcgttacgtaagcgcaggtgagtgctcctatcggtaaagcgctcagctgcctgtctgtcttcctggaaccaggaagaatcatagattgcacccatcaccctagattgtgttttgtttgtttttaattgaaatagagacatggtcttgctaggttgcccaggctagtctggaactcctggyctcaagctatcttcctgcctcggcctttcaaagcaccaggattacaggctgagccattgttcctggccgccccggtttgtaatagttattttaggtgtcattctccacctctacattcagagcttctttggctcagggaccatgtctttgctcatatttgtgtgcttcctcagtgataaatgatggacccagtaggtgtggcagtcagcaaatcctttcctcatcggcttcactttgttctttttttctggacctgacacatggtaagcaagagatgtgttaaacactactgcgtagaattaatttctcccaccgaaayactttaaatcctagtaggctttgaacctacttctgttagtacttattgctatgacttcctcaagaataagaaccttgtcttttattttttatagctcataaaaaataagttgtatatacacattgtttaaagagtgaagttattttaaaaacaacggttcccgccaatttttttcctccccagaggcaactccttttttttttttggagacagggtcacactctgttgcccaggctagggtgcagtggagtgatcttggctcactgcagtctctgcctcccaggctcaagccatcctcccacctcagcctcctgagtaactgggactgtagtcatgtgccactatgcccaactactttttgtattttttttgtagagatggggacttgccatgttgcccaggctggtctcgaactccagcgtgcaagtgatccacctgcctcagcctcccaaagtgctgggattacaggtgtgagccactgcatccagcctcttttttctgtttctttctttctttacatatattttttgagagagggtcttgccctgtcacccaggctggagtgcattgacaccatctcttgccaactacaacctccccttcccaggctcaagtgatcctcccacctcagcttcctgagtaaccgggactacaagcatgtgccaacatatgcagctaactttttaattttttgtgaagacgaggtctcactatattacccaggttggtcttgacctgctgggctcaagccatcctcccacctcggcctcccaaagtgttgggattataggcctgagccactttgcctggccctttacttttctataaaatttattttacttggaattcttaattgccttatgtttatgcttcatttttttttcttaattatcaattcaaccccaaactgtcttccagttgtctaagtttatctcaggatgcttagactcatcaagtattctatcaattccatttctcctaggcctttaagtctgcttcaaattggactagttactcctgtctttagagcacagttcatattggggaatagagggaacagggcaaatttcccttcagcctcattctgcagattccttcctcctttctcttgtcttttggatctcttggatcccttcctttctgtacccctacttttccatctttcttgatttattccttattttagtgcagccatctgtcagctttctggaggtgtacgggaagtaaattactttaagaatattccatgtcttaaaaaatctaactttgccctgtaatttggataatagtttggctgggtatagaattgtaggttgaaaattattttcctgccaaattttaaatgtattgttccattgccttctagatttctgtatttgttgttgaaatgtttgagaccatcstgattcttgatgtgacttgttttcccctttctaagcttggagaatcttctgtttgtctttaatattcagaaaatttatggtaatatgtcttggtatgggtgtattttcatccatattactggcccctgggtgtgggtactttcaatctgaaaaactcttgttcttcagttatgagaacttttcctgaataatttcattgctgatttcttcttctttgttttttcttaattccctcttttccagaactcactttctctctttctttctctctctctcttttttttttttttttaagacagtgtctgtctatgttgcccaatttggagtgcagtagctattcacaggcagaatcatagtgtactacaaccttgaactcctgggctcaagtgatcctcctgcctcagcctccctcgtagctgggactacaggtgcgcaccactgcatagcttttcccagaactcttattagatgaatgttggatctgttggactggccctttaattttttttttttttttgaaatgaagtttcgctcttgtccgccaggctggagtgcaatggcacgatcttggctcactgcaacctctgcttcttgagttcaagcgattctcctgcctcagcctcccgagtagctgggattacaggcatgtgccaccatgcctggctactttttgtatttttagtagaggtggggtttcaccatgttggccaggctggtcttgaactcctgacctcaagtgatccgcatgcctcagcctcccaaagtcctagaattacaggcgtgagccaccacacctggccagccctttaatttttttaaaagtcaggtttatggaggtataatttacacagagtaaaattaaactttgttagtgtacagttctatgaattttgacaaaagcatacagttgtgtaactaccaccacaggcaacacataaaccctctctacaaagaactacaacttcttgtagttcactccctctcctcacccttctctggcagctgctgatatgttttctgtcattatagttttgccttttccaacatgtcataaaatggaatcatatatataatatataaccttttgaaaagtctggcttcttccacttagtattatgcatttagaattcaaccaagttgcatgtatcagtagttcattcctttttattgctgagtagaattccactgtggatatatatacacagtttgcttattcttctattgatggacacttgagtaattttcagtctgagacaatatgaagaaagctactctatacattaaggtacagatttttgtatggacatatgtttgcatttctcttgggtaaagtcaatatcaaagagtaggatttactgtgttatgtcgtatgtgtttaactttgtaagttatgtgccaaactattttccaaagtgtatcattctgcttttccaacagcaatggatgagagcttcaactgccccacacccttccctgcacagtattgtcagtttccttcattctaataggtacatgctggtgtctcattgtggttttaacttatatatctccctaatgactaatgatgttgacaatcttttcatgtgcttatttgccatgtatgtaacttctttgaagtggcttttcaaaccttttgcccatttttaaagtaggattgtttttgtttttagttgggaagtttctttatatattctggatagaagttctgttttttgtttttgtttttgttttttttgagacagggtctcactctgtcacccagactagagtcaggctagagtgcagtggcatgatcttggctcactgaaacctccacctcctgggctcaagggattctcccaccctgtctccagagtagctgggaccacaggcatgcgccaccacatctggctaatgtatgtattttttgtagagacagggttttgccatgttgcccaggctggtcttggaacacctgggttcaagcaatccgcccacctgggcctcccagagtgctgagatggattacaggcatgataagtcctttatcggatatgttttgcatatattctctcaaactacaacttgtcttttttcaacagtacttttcaaataatagacattttcaactttgattaacctaatttatcaatttttgtttgtttgtttgtttttgagacggaggcttgctctgtcgcctgggctggagtgcagtggtgccatctcggctcactgcaagctccacctctcaggctcacgccattctcctgcctcagcctcccgagtagctgggactacaggcgcccaccaccacgccaggctaatttttttttgtatttttagtagagatggggtttcaccatgttagccaggatggtctcgacctcccgatcttgggatccgcccacctcggcctcccaaagtgctgggattacaggcgtgagccaccgcgcccggcctaatttatcaatttttagatgattagttctttttgtgttccaagatatacaccttatccaaggccacaaagattttctcctgtgttctctagaagtcttatagttttaaattttacatttatgtctgtaatccattttccattttgagttaaattttttctaataaggggtatgcattgaggttcatctttttttttttgaggcggagtctggctctgtctcccaggctggagtgcagtggcgcaatctcagctcactgcaacccctcgcctccggggttcaagcaattctcctgcctcagcttccctagtagctgggattacaggcacccaccactatgcccagctaatttttgtatttttagtagagacagggtttcaccatattggccaggctggtctcaaactgctgacctcatgatctgcccgcctcggcctcccaaagtgcttgattacaggcgtgagccaccgtgcctggccgaggttcatctgttcatctttttcacagagatgtctttttttttttttttttgagacaaagtcttgctcttgtcccccaggttggagtgcagtggcgtgatctcagctcactgcaacctccacctcccaggttcaagcgattctcctgccttagtcccccgagtagctgggattacaggcgcctgccaccaagcctggctacttttggtatttttagtagagacagggtttcaccatgttggccaggctggtctcaaacccctgacctcaggtgatccatccgccttggcctcccaaagtgctgggattacaggcgtgaaccaccactcctggccagagctgtcttaattgttccagcaccattcgtttaaaagtcctttggttttcttttttcttctgtttttcatctttgtctcttttttttttctttctttctttctatatttcctgggagattttctcaagtactgtctggtatatttcattttcacttctactttcttatttttaatttcaggaacttttttcttcttcctttactgttccttttttacagacaataccctgtacggctttcatggtcataatatcctcatcatttggaggatatttttcttcttctctctgctcagtctctgtttcatgtgaggcgtgttttatccatatatttcagtgtctacttttttgtgatgactgtttctcagatgtctgtaatccttgcttggccactcatatttaagagtgagtgactaaaaagttgagtggaagctgtaaacacatgagtggggcttgtctattctgaccttaactatatatctttagtggtctatgtcagcatcctgagaactttcctcccggtctggccagattttgcagagagggatcctctaaactcctgcctagatggtggaggtctgactcagtgttctggaatctaggtggaggaaagggtgagggaggtctcaggacccagaatacctgcttccacttaatgcttctgttttcattatggcatcccctcccttaactgtggtccttatccatttgagcatttctcatgcctaacctggcaggcattgttaactgagtaaatgaactgtgtagtttgttatttgttgcaaagaaacttttgatcattcactctcaatatgtaaatatctatttagaaattgcatactttactgttttattaaatatattatgtacattgtaaagcaaataaaaaagtaataaaggctgagataaaaatgaaataatgctttcctgtgcttgtgtgtgctggcttcatatttttattagccaatatctcaaggcacaatatacacttagaaaaaaaacacatcattagtcaacgtagagataaatatgtgtttcaagtagttctgagaggttttttgtttttttaattattattttttaaatttttatgtatttattttttgagacagagtctcactctgtcgcccaggctggagtgcagtggcgcaatctcggctcactgcaagctccacctcctgggttcacgccattctcctgcctcagcttcccgagtagctgggactacaggcgcccaccaccatgcccagctaatttttttgtatttttttggtagagatgaggtttcaccgtgttagccaggatggtctcgatcttctgacctcgtgatccgcccgcctcggcctcccaaagtgctgggattacaggcatgacccacagcacccggcctgttttttttattttttagttctgagmgttttgactattttaactaacttcttgttaggtcagttttgttgttgttgttgttgttgtttgttgttgttgttgtttttgaaatagagtcttactttgtcacccaggctggaatgcagtggtgtgtacatggctcactgcacccttgacctcccaggctcatgcagtcctcccacctcagccttgcaagtagctgggactacaggtgtgcaccaccacacctggcaaatttttgtatgttttgtagacatagggtttcaccatgttgctcagggcagtctcaagttcctgagctcaagctatcacctgccttggccttccaaagtgctgggattataggcatgagccactgcacccggccattcaggtcaggttaaattgtcattgttttaacctattaatgtgcctaagagggtttgttaggagtaggtagctttgacattttctttttggcttgagtttgcatcatagagttatcttttggatagaacagaaactcataataatgaatccagtgataataaaaactcaggtatgaaatgattaactcttgctgtttttagcaggcccaaactagccattttattaaccttacaacaacaaattcctgcattttatgaaacagaatcttgagaccctattattatgacattatggtgagattaaagtgtacagttcactgatggttggtgtattcagaagtgtgtagcttatatcacagtcaattttagaacattttcatcaccccaaaaggaaactctgtacacattagcagttactccctgtttccctacaaactccccagctctaggcaatcactaatctactttctgtctctttagatttgcctcttttaaacatttcatataaatgggaacatacggtatgtgatcctttgtgactggctccttttatttagtataatgaactaaggttcattagttgtagcatgtatcagtactttattccttattgttgccaaataatattccattgtgtggatataccacattttatttatccacttatcaatttctggacatttggattatttctactttttagctactatgaataatactgcttttgattaatgtacaagtttttgtgtggacatatagtttcaatactcgggtatatatctagaagtgggactgctggattatatagtaattctgtatttaacttttgagaaagtgccaggatgttttccaaagcagctgcatcattaatctttaagattaatattgtctatgaaataatatgtctttttttattttttattttttggagacaagagtctcgcactgtctcccaggctggagtgcagtggcaccatctcggctcactgcaacctctgcctcccgggtttaagcrattctcatgcctcagcttcctaagtaggtgggattacaagcacgtgccaccatgcccagccaatttttcatatttcagtagagatggggtttcatcatgttgcccacagtgstctcgaactcctgagctcaggcaatccatccatctcggcctcccaaagtactaggattacaggcgtgagccatcacatctggccatatgtatatatawgtgtgtgtgtgtgtgtgkatgtatatatgtgtgtgtgtgtatatatgtgtgtattttttttaatagagatggggtctcattctgtcacccaggctggaatgcagtggcaagatcatagcacactgtaacctggaactcctgggctcaagcaatcctcccacctcagcctccctggtagctgggactatgggcacataccaccatgcccagctaatatatttatttattttattttaaaatttatttaaatttattatttatttatgtatttatttttatttatttatttattttgagacggagtctcactctgctgccaaggctggagtgcagtggcaccatgtcggctcactgcaacctctgtctcctgggttcaagtaattctcctgcctcagcctcctgagtagctgggattacaggcacccaccaccatgcccagctagtttttatatttttagtagagacaggttttcaccatgttggccagtctggtctcgaactcctgacctcaggtgatccacctgcctcggcctcccaaagtgctgggattacaggcgtgagccaccacacccggtctatttatttatttatttttaagacagagtctcactctgttgcccaagctggagtgcaatggtgtgatcttggctcactgcaacctccaactcccaggttcaagtgattctcctgcctcagcctcctgcgccaccacacctggctaattttttttatatttttttagtagagacagggttttaccatgttggtcaggctggtctcgaactcctgacctcaggtgatcagcctgcctcagcctcccaaagctctgggattacaggaatgagccaccatgcccagcctatttatttattttttaggagatggggtctcactatgttacccaggcttgtctcgaactccatgagttccaaggatcctccctcctcggcctccaaaagtgctgggattcaagtcacaagccaccatgccctgtcaatatttttatttttaatctttatagaggtggagtctcactatgttgcccaggcttgtctcaaactcctggcctcaagggagcctcccatttcagcctcccaaagtgctgggattacaggtgtgagccactgtgcccagctgtttttttttttttaaagttctagggtgcatgtgcaggatgtgcatgtttgttacataggtaaacatgtaccatggtggtttgctgcacctatcaacccatcacctaagtattaagccccacatgtattagctctttttcctaatgctgtcccccactgccctcccccattagtgtattctttatccttcagaattagtgaaggatttttactgctttataatgatttctttttttttttgtttgtttttcagtcggctttctccagttgaatggtttcctttttgttaagttgcttttttctaatctctttaatgtgttccctttctttttcctctttcccaacaccaaagcagaaagggaccagaaacttcttgtccatttccatgaatagaaatgggaggctgggcgcggtggcttatgcctgtaatcccagcacttcgggaggccgaggcgggcagatcacgaggtcaggagatcgagaccatcctggctaacacggtgaaaccccgtctctactaaaaatataaaaagttagtcgggcatggtggcaggcgcctgtagtcccagctactccggaggctgaggcaggagaatggcgtgaacctgggaggcagagcttgcagtgagccaagatcacgccactgcacttcagcctgggcgacagagcgagactccatctcaaaaaacaaaacaaacaaacaaacaaaaagaaatggggctcctggctgggtgcagtggcttacgcctgtaatcccagcactttgggaggccgaggcgggtggatcacgaggtcgagagttcgagaccagcctgaccaacatagtgaaaccccgtctctactaaaaattcaaaaattagctgtgcgtagttgcacacgcctgtaatcccagctacttgggaggctggggtaggagaattgcttgaacccaggaggcggaggttgcagtgagccaagatcgtaccactgcattctagcctgggcgacagggcaagactccgtctcaaaaaaaaaaaaaaaaaaaaagagaaatagaaatggggctcctccattctcaacaaaccaccaattaaaacatttttttgttctctcctctctaccctccttcccctttcgcctgttcttggacttagagggacaacagaaatgcggcctaatgcgtagttcacacttataattctagcactttgggaggctgaggcaggaggatcgcttgagcccaggagctcaagaccagcctgagcaacacagtaagatcccaactctacaataaaagattagctgggcaggctgggcgcagtggctcatgcctgtaatcccagcactttaggaggccaaggtgggcggatcatgaggtcaagagattgagaccatcctggccaatgtggtgaaaccctgtctctattaaaaatacaaaaattagctgggcatggtggtgcatgcctgtagtctcagctacttgggaggctgaagcaggagaatcgtttgaacccaggaggcggaggttgcagtgatctgagataacaccactgcactccatcctggcaacagagcaagactccgcctcaaaaaaaaaaaattagctggacatggtggtgagtgcctgtagtctcagctacttgggaggctaaggcaggaggattgcctgagccttaggaggttgaggcttcaatgagccatgatcatgccactgcaccactccagcctggccaacagagtgagacctcgtctgcagaaaaaaaagaaagaaccattaggttgtgattttcattttctttttactagatgatgtcttaggccctgcttgatattttatgattagggttggctttagcttgaaaggttacttactcacgccagactttccatctatctaatccctgtgctggggtccaagacttacagatgctttctgacctttaaaaaagtcttttttggccaggtgcggtggctcatgcctgtaatcccagcactttgggaggccgaggcagggagatcacgaggtcaggagattgagaacatcctggctaacatgatgaaaccctgcctctactaaaaatacaaaaaaattagctgggggtggtagcggacgcctgtagtcccagctactccggaggctgaggcaggagaatggcatgaacccgggaggcggagcttacagtgagctgagatcaggccactgcactccagcctgggcaacagagcgagactctgtctcaaaaaaaaaaaaaaggcttttttgttttgttttgtttttaataaaaatgtacgactagaaaggccgggcgtggcagctcatatctgtaatcccagcactttgggaggctgaggcaggcggatcacgaggtcaggagatcaagaccatcctggctaacaccgtgaaaccccatctcttaaaaaaaaagaaaatacaaaaaattagccgggcgtggtggcgggcgcctgtagtctcagctgctcgggaggctgaggcagtagaatggcgtgaacccggaaggcagagcttgcagtgagctgagatcgcgcccctacactccagtccaggtgacagagcaagactctgtctcaaaaaacaaacaaacaaaaaatttacgactagagcacttactttgctctgtactacatccaaaggccaaaaatagaaatatgctactctgggcacatttcctgtggggtagccctgctcctcaaggagcagtagaaaacgaaataggccctgtcaggaaggtatttgcattctaatagaggagataagacctgctaggatatccctaatatacagtatttgatcaaagtcttagtaattattctttgaaatgtctctttcctttctatttccacttcagcccagtgggtattttaattacacagtgtgccacaatgcttcaggctgttcccaactacagtatcagacaccagcaaaaggtgacttgaatgtgaggctgcacatcagcatactgtggtcttacggctctaacgtatcctgcagtatgactgattcctacccacagatgcttttcttttcttttcttttctttttttttttgtgagacggagtttcactctgttgccaggctggggtgtagtggcgtgatcttggctcactgcaacctccgcctcctgggttcaagcgattctcctgcctcagcctcccaagtagctggcactacaggcatgcaccgccacgcccagctaatttttgtatttttggtagagacggggtttcaccatgttggccaggatggtctcgatctcttgacctcgtgatctgcctgcctgagcctcccaaagtgttgggattacaggcgcgagccaccgcacctggctttacagatgcttttcatcacagtcctcccttcccagtgttctccaaagtatgactgcatttttcaaaatctctttaaatttcctcttgtttgaaatatgatttggaatgcagcgattcccccccacacacaaaagaaatatgagagaatgacaactctaatgatattctacaaagagagaaagtttataatcagggcattaagcaaackcacaaattacaattctctcacagaattttaagtagaaggtacagatttggagcatttttttccaccgatgtatttacgggaaattttgtttattctcatcagacatttagtaaacggaacaacccaatgaattggtcctaatgaatataccttgagaatggctattttatccccagcttcattagggaggctctgttgattccaaatctttttaagtgcttttcctgacactttccccctcccccatattctccatttagttgagcaacttgcatcttaaggaagagaaaatcaaaccagataccaatggtaagtaactaatagctagtttgaaaacaaatgtgatttccttcagtatttttgttttggcataacaactgtctggaaaaaaatttgtatttgtaccaggcagggcattggcagatactggtaccatttgatttgtaaatcaacaaactggattgtatgaccaaagtgtttttatttatttttttgtttctgtttactttttaagagacagggtcttgctctgttgcccaggctggagtgcagtggttcaatcatggttcactggagcctcaacctcccagactcaagtgatcctccacctcagcctcctgagtagctgggactacaggcacaacccactacgcccaactaatttttattttttattttttatttttttgagacagagtctcgctctgttgcccaggctggagtgcagtggctcgatctcggctcactgtaagctccacctcccggcttcacaccattctcctgcctcagcctcccgggtagctgggactacaggcacctgccaccacgcctggctaatgttttgtatttttagtagagatggggtttcactgtgttagccaggatggtctcaatctcctgacctcatgatccaccggccttggcctcccaaagtgctgggattataggtgtgagccactgtgcccaggtatttttgtttttttatagagatgaggactccctgtgttgcccaggttggtttctaactcctaggctcaagcagtcctcccgcctcagcctcccaaagtgctgggattacaggagtgagatattacacctggtttcaaagtgtttttaatacaagaatgaggattgcacactgatagcaagggtgtggggggaacaaagaatgaggctacttaagtgggactaattactaaccatcggactacattgacaaagactaatttttttcttaatgttctcaatttgggatgagatagacaaagtatgagcaatctgacagtttacctatcctaattattctgaaatcatatttatccaaagttaagatttccattaaattattgttgatgtacttaatattacaggaaggaaatgtaacatttgcctttctcaaaattcacttaaatcttttttgtatgattttatataaccacagtatcattcgactataaatttatattaatcaatttataggccgggtgtggtggctcacacctgtaatcccagcactttgggaagccaaggctggcggataacctgaggtcaggagtttgaaaccagcctgactaacatggtgaaaccccatctctactaaaaatacaaacatttgccaggtgtggtggtgcacccctgtaatcccagctactcaggatactgaaacagtggaatctcttgaacctgggaggcagaggttgcagtgagctgagatcgcaccactgcactccaggctgggtaagagtgagactgcatctcaaaaaaagaaaaaaaaaatttatatgcatgaattttttttgttggtcttactgctcatttgttatatacatgaattttaatggcattattgtgttcacctattgataaaatacgatttgcatagatattcctctgttgagcatcaaggtggtttctgatcactaattgctctaatctttctataatatttaagaagtattgattcaatgagggaaataacaggttttgaggtacggagaggagacctagaataggaaagaatatgagcaacagaggccgggcgcggtagctcacgcctgtaatcccagcactttgggaggccaaggcaggcggatcacgaggtcaagagatcaagaccagcctggctaacatggtgaaaccctgtctctactaaaaatacaaaaaaaattagctgggcgtggtggcgggtgcctgtaatcccagctactcgggaggctgaggcaagagaatggcgtgaacctgggaggcagagcttgtagtgagttgagatcgcaccactgcactccagcctgggcgacagagcgagactccatctcaaaaataaataaataataaaataaatatctatctayatatatatatawgtgagcaacagtgttttacacctttgtttatttagggacaataaaatgtttttatcagcggctcggtttcctcatttattttttgctccccaggcctttacaaaaacttctagtgtcatagaatttgaattgtctcaactgttgggtatgggatgcgattytgaatgatggccactttgtgtctataaaggtgctgttgtcaagaccaatgccaatgcagagaagacagatgaagaagagaaaggtaacacagccgtggagctttatataataacaagcttctacattctaagaaagtggattgttatgaggcttcatttttatacccagtttggcttgactttaataggcgatacagtgctagcataaaggttcaatataggggccgggcacggtggcttacacctgtaatcccagcactttgggaggccgaggtgggcagatcacgaggtcaggagatcgagaccatcctggctawcacggtgaaaacccgtctccactaaaaatacaaaaaaaaaaaaaaaaattagccgggcatggtggcagacgcctgtagtcccagctacttgggatgctgaggcagaagaatggcatgaacccgggaagcagagcttgccatgagccgagatcgagccactgcactctagcctgggcgaaagagcgagactctgtctcaaaaaaaaaaaaaaaaaaaagttcaatataaatagtcagtaggtgaaggagttctaatggtttacgtttagagaaattttacatttaacaactgaacagttgaatagggcattataaaaaattttcagttgcatctctattgtccagtaaaattaagcttaatgttattttgacacatttgacatggatgacgagaccaacttgtccaatattaaggtacagactttgttaattcctgtttttttttttattgttgtgattgctacattaattactttaggtttatatatagtacaaattggggagtaaatatgtgggtctggataggaggaatagataactgcaggaaaagagggctgttagaatagagtctggaaaagaatatgaggcctaaatgggtgatgtatcataacttttttctttaataaaactattttaatttataagtcaaaactatgacgtaccttgaatttgaatgttcagtacattattatttaaaatacaaatggcagttgaattagagtaaacrcctggtaggtttcaaggactttttaaaattctttgctttctttttcctgacagaggacagagctgcccagtccttactcaacaagctgatcagaagcaaccttgttgataacacaaaccaagtggaagtcctgcagcgggatccaaactcccctctgtactcggtgaagtcttttgaagagcttcggctgtgagtatttattcaccttctgactcttcccctttgcactgaaatagagatcctaggtctgttatagatatcttttgaccacaacagagcagttttagctaaccaagtttttttttttttttcgagacagagtctcactctgttgcccaggctggagtgcagtagcgcgatctcggctcactgcaacctccgcctcctgggttcgagtgattctcctgcctcagcctcccaagtagctgagattacaggtgcacaccaccacgcctggctactttttgtatttgtagtagagatggggtttcactatgttggccaggctgatcttgatctcctgaactcatgatccacttgcctcggcctcccaaagcgctgagattacaggcatgagccaccgcacccagctgctaaccaagttttataaaagaatttagctgggtgccgtagtgcacacctgtaatcccagcacttttggaggccaaggtgagaggatcacttgaggccaggagttgcagaccagcctgggcaacatagcgagaccagactccatctaaaaaatatacataaatactgtagatgctttgggatatttagtaaaatttccagatgatggataaaagctttagctgtactaacatgtattcagttcaccacagctcaattattgttgattacaaactatgtgtaggccaggcatagtggctcatgcctgtaatcccagcactttgagaggctaaggccggcagaccacttgaggtcaggagttcaagaccagcgtggccaacatggtgaaaccctgtctctactgaaaatacaaaaattagtccaggcacggtggctcacgcctgtaatcccaggactttgggaggctgaggcaggtagatcacgaggtccagagattgagatcatcctggctaacatggtgaaaccccatctctactaaaaatacaaaaaaaattagcagggcatgttggcgggtgcctgtagtaccaggtactcaggaggttgaggtaggagaatggcgtgaacctgggagacggaggttgcagtgagccgagatcgcgccactgcactccagcctgggtgacagagcgagactctgtctcaaaaaaaaaaaaaaaaaaaaaaaattagcggggcatggtgccatgtacctgtaatcccagctattcgcgaggctgaggcacgagaattgcttgaacccggaaggtggatgttgcagtgagccgagactgcacctttgcactgcagcctgggcaatagatcgagactctgctcaaaaacaaacaaacaaaaaactatgtgtaaacagtaaaagagaaaaatcctccagatattttgctgctttcctcaaccaaagagactgtgactttcatctttaactgtttttctaggaaaccacagcttctccaaggagtctatgccatgggtttcaatcgtccatccaagatacaagagaacgcattgccactgatgcttgctgagccgtatgtgtcctattacaactccatttcattttagattttctatttttgaaaactattattattttcacaggccagcaaggtggcttatgcctataatcccagcaacctgagaggcaaggcaggaggatcgtttcaggccaggagttcaagaccagcctgggcgatgtagcaagaccctgtctcaacaaaaaaaaaaacgttataaacttggccaggcatggtggcatgcagctgtagtcccagctactcaggaggctgaggcaggaggatcacttgagcccaggagtttgaggttgcagtgaaccatgatcataccattgtactccattctgggcaacaaagaaagaccctgtctcgaaagagaaaaagaggaggctgaggcacaagatttgcttgaacccgggaggcagaggttgcagtgagccgagatcatgtcactgcactccagcctgggtgacagagcgagactttgtctcaaaaaaaaaaaaaaaaaagtcaagggggccaggtgcagtggctcatgcctgtaatcccaacactttgggaggccaaggcaggaggatctcttgaggtcaagtgttcgagaccagcctggccaacatgatgaaacccgactctactaaaaaaatacaaaagttagccaggtgtcatggtgtgctcctgtagtcccagctactcgggaagctgaggcacgagaatcgcttgaaccccggaggtggaggctacagggagctgagatcacaccagtgcactccagcctgggcaacagagtgagactccatctcaaaaatgcaaaaaaaaaaaagaaaagaaaaaaaatcatctgtaatctccctctccccacattattaacattttggagtggagacttctagacttttctctatgtaaacatataacttttaaaaamgttgacatatatgaccggggtggtggctcatgcctataatcccagcactttgggaggccgaggcaggtggatcacctgacgtcaggagtttgagaccaggctgaccaacatggctaaaccctgtctctactaaaaatacaaaaaaaaaattagctggtgtggtggcaggcgcctgtaaacccagctacttgggaggctgaggcaggagaatcggttgaacctgggaggcaggggttacagtgagctgagatcatgccattgcactccagcctgggcaacaaaagcaaaactccatctcaaaaaaaaaaaaaaaagttgacatatggccgggagcagtggctcatgcctgtaatcccagcactttgggaggcctagccaggtggatcacaagctccggagatcgagaccatcctggctaacacggtgaaaccccatctctactaaaaatacaaaaaattagctgggcgtggtggtgggcgcctgtggtcccagctacatgggaggctgaggcaggagaatggcatgaacctgggaggcggagcttgcagtgagccgagatcacgccactgcactccagcctgggcaacagagcgagactccatctcaaacaaacaaacaaaaaaaggtgacatataaataatgttttacatgctgtgttttttaattatatgatcatcttcctatgttggtaaatataagtttatatcgtatatgcaccatgatttcattgtattgatatataaaagctattgtgtcaaatataatagaagccaaacagctctaggagacctgaataatacagttactaaggtggtttcctggtgcagggcatctcccactttcataggcatacaaatctcatagacatttattaaaatgcagggtctgaatttagtaggtctaagtggggactgagtgtcaacatttctaataagcttgcaggtgatgctgatgctgctggtttcagatcacattctgagtacaagattctagagcatgatggaattttaatacagattgatcctatattttatatgattatatacaattctgcatataatgctaaattctgaatctcttttttttttttgtctaaaaatagatattttagggcaagtgtggtggctcatgcctgtaatcccaatactttgagaggccgaggcaggcagatcgcttgagcccaggagttcgagaccagcctgggcaacatggtgagaccctgtctctactataaatataaaaaagtagccaagtatggtggcatgtgcctgtagtcctagctactagggaggctgaagtaggaggataacctgagcccagaagattgaggctacagtgagcaaagattgtgccactgccctccagcctgagcaagagtgagaccctgtctcaaaaaatcataaataaaaataaaaatagatattttaggtctgtactttctcaaagttttttgttctgtgtcataacagtgacattttctccagatggatagtgtctttttttaagcttggcactttgagcatgcttagggtaaataaatggagtatttattacatggtttcatactgattgatcatttatatttgtggatctaatatttttgtagatgctaactttttttttttctgggagataaggtctcactctgtcacctaggcaggagtacagcagtgtagtcatagctcactgcaccctgagcacctggacataagcaatcctcctgcctcagcctcccaggtagctaggactacaggcacgtgctgccatgcctggctaagtttctttatttaatagagatggggtcttgctatgttgcccagactggtcttaatctcgtggcctcaagcaatcctcccaccttggcctcccccagttttttttttttttttttgagacagggtctcactctgttatccaggctaggtgcactggcaccatcttggctcactgcaacctctgcctcctgggcgtaagcaatcctcccacctcggcctcccacccaagtagcgggggccacaggtgcaagccaccatgcctggctaatttttatacaatttttttttttttgagacagagtctcgctctgtagcccaggctggagtgcagtggcgtgatcttggctcactgtaaccaccacctcccaggtcctggatcaagtaattctcctgcctcagcctccggagtagctgggattacaggcacgctccaccatgcccagctaattttttttttgtatttttagtagagatggggtttcaccatgttggccaggctggtcttgaactcctgacctcgtgatccagccgccttggcctcccaaagtgctgagattacaggcgtgagccatcgtgcccggcctaatttttatatttttatcagagacagagttgtgctatgttgcccaggctggtctcaaaccccccaaagtgttgggattacaggtatgaggcaccacactaggctttttttttttttttttttgagacggagtttcgctcttgttgcccaggctggagtgcaatggcgcgatctcggttcaccgcaatctctgccttccaggttcaagcgattctcctgcctccacctcccaagtagctgggaytacaggcatgtgccaccatgcctggctaattttgtatttttagtagagatggggtttctccatgttaatcaggctggtctcgaactcccaacctcaggtgatccgcctgcctcagcctcccaaagtgctgggatcacaggcgtgagccactgcgcccggccttcaggcttttttttgttttgttttggggttttcttttggtggagatggggtcttactttgttgcccagacttgtcttgaactcctacgctcaagcacgcttcccaccttgccttcccaaagtgctagggttacaggcatgagccattgggcctagccaagaagctcatttttagattgacagtattagaagagaccagcattattactagaattatctactacctttcatcattaacaaatatttattgagtgcctgttatataacagatactatgctaggcacttggatacattagtcaacaacgcagaccaaaattcctgcccacaaggagcttatgttctagtttgaaatatagctaattcatttttattaaaatataacaggtgataaattacaaacattaatgccactgaatagtacacttaaaagtgggtaaaagggcaaattttatgacatatattttttacttcaaataaaaataaattttggccaggcgtggtggctcacgcctgtaatcccagccctttgggaggccgaggcaggcagatcatttgaggtcaggagttcgagaccaggctggccaacatggtgaaaccccatctctactaaaaatacaaaaaattagctgggcatggtggcacgtgcctgtaatcccagctactcgggaggctgaggcaaaagaatcgcttgaacctgggagacggaggttgcagtgagctgagatcgcgccattggactccagcctgggcgacagagtgagattccgtctcaaaaaaaaaaaaaattaataataaattttggccaggcatagtggctcatgcctgttatcccagcaatttgggaggccaaggcaggcagatggcttgagcccaggagtttgagaccagcctgggcagcacagtaagacctcatctgtattaaagggcaaaattaaaaaagaaattaaatatacaacactttattctaactacaaggggcaacagatgttttgacagggaatctagatgtttaaacagaaatagaatcaagagttaccggtgtggcggctgggcgcagtggcttacaactgtaatcccaggactctggaatgctgaagtgggcggatcacttgaggtcaggagttcaagaccagcctggccaacatggcgaaacccatctctacaaaaaaaacacaaaaatagccatgcatggtggtgcataccagtcccagctactcaggaggctgaggctccggaattgcttggaatccgcatagtggcggttgcagtgaactgagattgtgccactgcactccagtctgggcgacaaagtgagaccttgtctcaaaaaaaaaaaaaaaaaaaaaaaggccgggcgtggtggctcacgactgtaatcccaacactttgggaggcccaaggcaagtggatcacctgaggtcagcagttcaccagcctggccaacatggtgaaaccccatctctactaaaaatacaaaaattagccagacgtggtggcaggcatctgtaatcccagctactctggaggctggggcagaagaattgcttgaacctgggaggcagaggctgcagtgagctcagatcgcgcctttgcactccagctcggtgacaacagtgaaactccgttgcaaaaaaaaaaaaaaaaaaaaaaagtccccataaggaacagcttacttttgccagattttaaaattccacctgtggccgggggccctccccatggtttcacttttagttcatgtttcttctgtttgtttgtttgttttttcccctgccggaagacctcattttcctcgtccatatctttggcctgctgcggctgctccgttttttgttttttgtttttttgagacagggtcttgctctgtcaccagggctggagtacagtggtgcagtctcagctcactgcagcctgcaacctccaccctccacctcctgggctcaagagatcctcacatgtcagcctcccaggtagctgggacttcaggtatgtaccaccatgtccagctaatgtttgtatcttttgtagagaaagggtttcggtattttgcccaggctggtctcaaactcctaggctcaagaaatcacccacctcaacctcccgaagtgctgagattgcaggcatgagccactgcacctgaccttgcctgctttttttcttttttctttttttttttttgacactgagtctcgctctatcacccaggctggagtacagtggcgcgatctcggctcactgcaacctctgcctcgtgggttcaagcgattctcctgcctcagcctcccaaggagctgggactacaggcgcccaccaccatgcctggctaatttttgtatttttagtagagtcagggttttaccatgttggccaggctggtctcaaattcctgacctcgaatgatccacccacctcggcctcccaaagttctgggattgcaggcatgagccaccgcgcctggccttgcctgcttcttgagctgcttcttgccaccttcaaggcaagacttggttcttgccactcttaccccctaccctgctaccaaaacctacatcttgttttttttaggcatttcaaggtagattacacttttaaatcaagtggttaaggtaggatctcctgaagtagatatctgggcaaagacttgaaggagagaagggagttagcatgttatctggggacagttgtcccaagcagagcacagccaaggcagaagccctaagacaagagcatgactggcatgttctctgagcagtactagggccctgtggtggaacgaagtaagggagagagagtagtaggaaatgagagctgaggtgtaatggggagcagatcatgcaggacctgtatgccattatgagggtttcaacttgtactctgaatgaaacgaggaattattggaaggtctttgggcagagaagtaatgtgagctgactcacattttaagaatcagtaggccaactgcagtgactcacacctataatcccagcactttgggaggctgaggcaagaggatcacttgagcccaggaggttgaggctgcagtgagccaagattgtgccactgcactccagcctggtcaacagagtgagacctaatctcaaaaaaaaaaaaaaaaaaaaaaaaagaagaagatgtggagtgcttcaaatcccaccagaaaatcttatttctatagtgccctgttcttgtgaagctagcatatgtaactctgctacataatccaaggtctcctataaatgaatttttaatactcatttttttaaactttgttaactaaaaggttgagatttaagctcctaactagtttgtttcttgcgcagcccacagaacttaattgcccaatctcagtctggtactggtaaaacagctgccttcktgctggccatgcttagccaagtagaacctgcaaacaaatacccccaggtaaggatttatgaatttaggttttctactaatgcatagatagaaggggatttccatttgatggattaaaagacaagctatgggctgggtgcagtggctcatgcctgtaatcccagcactttgggaggccgaggtgggcggatcacctgaggtcaggagttctagaccagcctggccaacatggtgaaaccctgtctctactaaaaataaaaaattagctgggcctggtggcatgtgcctgtaatcccagctacttgggaaactgaggcaagagaatcatttgaacccgggaggcggaggttgcagtgagctgagatcgcaccattgcactccagcctgggcaaaaagaacgaaactctgtctcaaaaaaataaaataaaagccaagctatgcattactttttacacaaactgaaactccttaaattgagcacaaataatacgggatatcttccaatggcaataaaaatcctgtttcctttttccatggtgtgccagttctgggatgcttcttacaggcttggctcctttacttgcaggaaaacctgtttcatcagcaactgccatccattagaaagttctgagagctttctgagtaaacgaaaagaaagctaatgccaattggaactttagatccttgctcatgggtgggtttttgtattgcagtggccagtatctgttttcaagtgtctttacccagccagagttctgacccctaagaattctagcttatgactctgtagcttaaagaatcaaatggtgtacattttaatgtacatattctttccttcagcttcagctggaggagtggctaagtactaatggtaattcccctttgcaaaagmgctattgtcttgaatttgcactctgcattcttttcctgccagtgtctatgtctctccccaacgtatgagctcgccctccaaacaggaaaagtgattgaacaaatgggcaaattttaccctgaactgaagctagcttatgctgttcgaggcaataaatgtgagtatgtgaatttggtcctaaatcatcaacctaattctttttattttgaaatatttcaaaacccacccaatagttgaaataatacaataaacacatgtatgttctccagctagattcaaaaacttaacattttgccatatttgctttacataaatgtatacatttttgtcaaaccatttgaaagtaaactgcagacatgcacctcatgaggacattctttgccatacctatggatacccttttatcacaaccaggaaaattaacagatttcctagaataactaataccagtccatttttattcctccccagctgttcccaaagtcttcctttatagctgtttggtttttcgaccaagatcaagttagcgtttatacgttgcgtttggttgttgtacttgtttctttcaatctagaattgtacccctacctttttctctccctattatatttaacattttgcacagaccagactagttgcttttcaaatattctacattctggccgggcgcggtggctcacgcctgtaatcccagcmctttgggaggccgaggcgggcagcagatcacgagatcaggagattgagaccatcctagctatcatggtgaaaccccgtatctaataaaaatacaaaaaaattagccaggcgtggtggcgggcacctgtagtcccagctacttgcgaggctgaggcaggagaatggtgtgaacctgggaggcagagctagcagtgagctgaaatagcgccactgcactcgagcctgggcgacagagcgagactccgtctcaaaacaagcaaacaaacaaaaaacaaacaaacaaaaattctacattctagatttgtttatttttatttatttattttagaaacagagtcttgctctgtcactcaggctggagtacagtggcatgatcttggctcactgcaacctctgccctccgggttcaagtgattctcctgcctcagactcccaagtagctgggattacaggtgcctgccaccatggctggctaattttgtatttttagtacagatggggtttcaccacgttggccaggctggtctcaaactcttgacctcaggttatccatctgcctcggcctcccaaagtgctgagattataggtgtgagccactgtgcccagacttctttcttttttttttgagagagagtctcgccctgtcgcccaggctggagagcagtggcacagtcttggctcactgcaagctctgcctctggggttcacaccattctcctgcctcagcctcctgagtagctgggactacaggcgcccaccactacgcccagctaattttttgtatttttagtagagacggggtttcactgtgttagccaggatggtctctatctgctgacctcgtgatcctcccgccttggcctcccaaagtgctgggattacaggcgtgagccactgcgcctggccgccttcttttttttattttgagacagtttcgctaggtcacctaggctggagttctgactccaggcacgagccaccgtgcctggccacacccagctaattttctaaaaattttttttgtaggccaaacatggtggctcatgcctgtaatcccagcactttagcaggccgaggtgggtggatcacgaggtcaggagatagagaccatcctggccaacatggtgaaaccccatctctactaaacatagaaaaattagccaggtgtggtggcatgtgcctgtcgtcccagctactcaggaggctgaggcaggagaatcacttgaacccgggaggtggaggttgcagtgagccaagatcgtgccactgcactccagcctgggcgatagagcaagactctgtctcaaaacaaaacaaacaaaaaaaaacaaacaaattttttttttttttgtaaagacagtgtcttgctatgttgcccaagctggtctagaactccaagtctcaagcaatcctcctgcctcgtcccctcaaagtgatgggattacaggtgtgagccactaggccaggactgaatttgtttaattgcctaatttatttatcttcattagcagaataaaaacccagaatgtttatggctattgactctggggcttattctgttaattattttttgttactaattttttctacactagtttgttttacagttaatattatttaagtaattttaaaagtgttgttggccggacatgatggctcatacctgtaatctcagcactttgggagcctaaggtgggtggatcattgtaaggttaggagttcgagaccagcctgaccaacatgatgaaacccagtctctactaaaaatacaaaaatattagctgggcatggtggtgcacacctgtaatcccagctactcaggaggctgaggcaggagaattgcttgaacccgggagggggaggttgcagtgagccgagattgcaccactgtactccagcctgggcgacagaatgagattctgtctcaaaaaaaaaaaagtgttagaggtttggttgagttttatggatctctgaaacaaatgtgaccttatgaaaatcaagtctgcatacagtgtcctaatgccaacttgaggccagttctgaaaagtaaataatacagtgaaacttattgggagataatcatttaaaattttgcaatttgtattcgaattagaagggtagagaattctgaattttttttttttttttttttttgagacagagtctcagtctgtctccgggctggagtgcagtggcgcgatctcggctcactgcaacctccgcctcctgggttcaagcgattctcctgccccagcctcccaaatagctgagattacatgagcccaccaccacacccagctaatttttgtatttttagtagagatggggtttcgccatgttggccaggctggtctcgaactcctgacctcaggtgatccgcctgcctcagccttccaaaatgctgggattacaggcatgagccaccgtgcccggcccttttagttatttttaaatgtacaatatattgttgactgtagtcaccacattgtgctatcaaatgctagatcttacttattttaattgtatttttgtacccattaccttttcagcatttttgtctgtttttatgtccattaaatgctatagtgatatcctaacctttccttaatatattaatgcaaacagcaaaacatttgcattaaaatatataataggtttagaatttctcagagagaagagctggctttgcctttgaaatacccatggaggccgggcacggtggctcatgcctgtaatcccagcactttgggaggccgaggcaggtggatcaccaggtcaggagttcaagaccagcctggccaagagagtgaaacccacctctactaaaaatacaaaaaaaaaaaaaattagccaggtgcagtggcaggtgcctgtaatcctagatacttgggaggctgaggcaggagaatygcttgaacctgggcggcagaggttgcagtgagtcgagatcatgccattgcactccagcctgggcaacagagtgagactctgtctcaaaaaaaaaaaaaaaaaaaaagaaagaaagaaatacccacacatggaaaacatcttggggtctccacagtggaaagaggccagaagatcagtgagcagattgtcattggcacccctgggactgtgctggactggtgctccaagctcaagttcattgatcccaagaaaatcaaggtgtttgttctggatgaggctgatgtcatgatagccactcagggccaccaagatcagagcatccgcatccagaggtagggatctcgagggtgggggactcctcagaytccccatctgcagtgtcttctcccttcacttcagatgcctcctctggcttctgcctgggtcttggctctcgtactctcagcagcatttgtttgacgggccacttccgtgtcagygctggccacagtccctcccagcctgggttgagaaaggagacctagggactctcccccaacccctgtccccatcccaggcctgctgctcctcctccccaagacgctcctctcccatcagccttcctgggcatctagaccctcccagctgggaaggctgtgcttctgtcgcttcccggggccacctggggccacctaccagggccttcccttgcaggatgctgcccaggaactgccagatgctgcttttctccgccacctttgaagactctgtgtggaagtttgcccagaaagtggtcccagacccaaacgttatcaaactgaagcgtgaggaagagaccctggacaccatcaagcagtactatgtcctgtgcagcagcagagacgagaagttccaggccttgtgtaacctctacggggccatcaccattgctcaagccatgatcttctgccatgtgagtagcagtggcagtggcaggcctggcccttccctctcagccagstccccacagggctcaggagractggatgcccctgggtgccatgggaagaaacgaagtggtttgttctcctaaggttttagtgagtcgtaagagggagactttgattccacttcttagtgattacttggagaaaaccccaagtaacagccaatgaaataatttttagatttttaagaatataagctgggcggctggcacggtggctcatgcctgtaatccctgcactttgggaggccaaggcgggtggatcacctgaggtcaggagaccaagaccagcctggccaacatggtgaaaccccatctctactaaaaatacaaaaaattagccgtgcgtggtggtgtgcacctgtaatcccagctactcaggaggctgaagcaggagaatcgcttgaacccgggaggtggaggttgcagtgagctgtgattgctccattgcactccagcctgggtaacaagagcgaaactctgtctcaatacaaaaacaaacaaacaaacaaaaaaccaacaacaaaaaaagagtataagctgggcaagtacctgtagtcccagctactcaagaggctgaggttggaggatcgcttgagcccaggagttcagaccagcatgggcaacatagtgagacctcatcattaaaaatatatatatggctgggcacagtggctcacgcctgtaatcccagccttttgagaggctgaggtggggggatcttcttgagcccaggagttcaagaccagcttgcacaacatagcaagaccccatctctacaaaaattttaaaaattagccaggcgtggtggtgcatgcctgtggtcccagctgcttgggaggctcagatgggaggattgattgagcccaggaggttgagactgcagtgagctgtgactgtgcactccagagtgggcaagagaatgagatcctgtctcaaaaaatttaaatttaaaataaaattttaaaatatatatgttgtttgtttgtttttgagataaggtcttgctctatcattcaggccagaatacagtggcatggtcatagctcactgcagccttggctcttgttactagggctacaggtatgtgccccatgcatgtcagcctaatttttatttttatttttgtagaggtggggtcttgctatgttgtccaggctggtctcaaactcctggcctcaagcaatcttccagcctcagcctcccaaagcctaagactacaggcacgagccaccatatctggcaagaacatagactatttaggaatgaagatctttggctaaagccacactcttcctagatacaaaagtaacagcagttacataacttatctaaaaagaaaaaaatcatatgactaaaattctatttgaaagaaaaatttttttttgagatgggttcttgccatgttgtgcaggccagcctcgaacacttgggctcaagtgtgtagcttggactacaggtgtgtactaccatgcttcattgagaaattttaagcctaacctcctaactggatttagcagggccttcatgtattttaatcgtggcaagccactttttagcagttgtcttccttttgtttttaacaggtctcttcataaaaaacaattcttttcactacagactcgcaaaacagctagttggctggcagcagagctctcaaaagaaggccaccaggtggctctgctgagtggggagatgatggtggaacagagggctgcagtgattgagcgcttccgagagggcaaagagaaggttttggtgaccaccaacgtgtgtgcccgcggtgagcagaggacgtgtcccacctggtctgccaggcttggggtcccaggcccagttagagccagaaatccttgtacacagggaagtcggatggtctcagggagatgggtggggttggtgacactattcctttctaggagagactgtttggatttccctcaggtgataagaactcccacagaagccaggagtcctgacttggtggaaggaaatgtacaggcatctgactggtagagaacagagcctgctcttccagggatgcccatctccagaacattgtgtctcccagaggcttactgactgatttcataattttgttggcacctgccaaagttttgttcttttcctccaggttctgctgtatgcctgtatgtgccctctcttgtacccaattcccagagttggcctgtcccaaatgtatttatttatttttttgagacagagtcttgctcaatggcccaggctggagtgcagtggcacaatctcagctcactgtaacctccgcctctcaggtttaagtgattctcccgcctcagcctcccgagtagctgggattacaggcgcctgccaccaagcccagctaatttttgtattttcagtacagatagggttttgcagtgttggccaggctagtcttgaactcttgacctcagatgatctgcctgcctcggcctcccaaagtgctgggattaccggtatgagccaccgcactcggccccccaaattctttccctttacccgaagttggtatgcattgacttacctgtggacaacagtgatttttgtctcctgtccttacttctctctgtctccaactctcagggactcattcatcacctctccctgcaccccaccccctgacccgtgctagtttggtatctatgcctgtagctttgctttggggcatcatctgaatctcatactgcacggcctttcagatctggcttcctgcactcaatgtcatgcacgtctcttagtgccgtgttcccttaatgctgagtcatgctccattgtatggatggaccacatgactgatttgcctcctgtccttagtyctctcagcctccaactctccttcctgcaggcattgatgttgaacaagtgtctgtcgtcatcaactttgatcttcccgtggacaaggacgggaatcctgacaatgagacctacctgcaccggatcgggcgcacgggccgctttggcaagaggggcctggcagtgaacatggtggacagcaagcacagcatgaacatcctgaayagaatccaggagcattttagtgagtcccggggagggtcctgtgcctggcgccctttgctaagtagggcggggtggtgaaaggggtaggatcttctgtagccccaagagaggctctgtccctagcacactcccctcctttctgaccatatggcagttctcagggagcacacctggagacttcaggacccagggactccaagaacagctcccctgtgactgggcttcggggcgtggggctctgactgttgctgtcagtgactaggggccctgctgccccctgcttaggcacccggagcctttggggctgaatgaatgattgctgtggcccaagatggggcacattcctgggcagggtagagacctgtgtatctttcccccagataagaagatagaaagattggacacagatgatttggacgagattgagaaaatagccaactgagaagctccaccagccactgatgccagccctggcactgcccctgcacaggagacaagtgcgttyagggcacaggccccgacatcaccccaaggacaacggcasaagtagagagaaactacctacctcacttcaaattatgtttggacttracaaaaatgkatgcaaatgatgggggatrgwagaaaaaaattatttacacaaccttggaagattaggcatgaatacacagagatttaccttttggaagtttcatcttttaatttggccagtgtttccttcatgctaatctagatgctgtggctgattacttgcccaggatctcctgtggcagcctctgcttgttctctggcttggagtggatggggcagcctccagctcctgtggaagtaatggaatagtggtggaaagggaacacagagagggaggcttccagtaagataggtgtgtaagcccagccatcatgtttggaatggcatgaggcagcagaggaggcctgagagctgctgctttggacttgggggtgggacagctcatctgagtattgccagccccctgtcctagtgcccacagcagaagggaatttgttaaataagcatggaccaaaatgccaacctctcggttgtgtatatgggtttgtgtcacaggactgtgacctgttctcggtgggtgcagtctgtgtagagtgcacatctgattattggtgggtcctgtgcctgtgcttaagcaagtcctgtggagaagtcatcatggagaattagtggtggccctagcgtgccacaaaacctggtctcatgagcatttgcaacatcccttttacatccttaatatccccttaccccacagtagccccaaacaaatgtgatctgaggtttagatcctcagtgaaaattgtggtttcaagtcttcatggccagcctcaaggcagttctagatgtgatcagcagtagtcacaaattcttgttttgtctccacacccagaaggcaagttttgtcagagctggggaataatttcagatatttgacatcttgattataaagggcttctgaacatctgtgtttactgcctttggaatacaaacaggtgcaactgagggactagctacactaccaccatttatctgtccaaggcaagagtatcaccaaggcctttgctccagccttacttggcatctttgcgcaagatagtcagagcaaacaatagtaatggacacttctcacacctggccaaggctgttggtacccacgaaatgacagcaaagatgagaggaaactgaattgcaagagcaatatgaaaccccaaccaagaggagtactctgcagttctttggctttggtatagagtggccactttctctaggacctggaagaagagtttgatggctaagaacgattgtgatcctaggtcttctttgtacgcatctccgtatttaggccagatctgcctcctgggaagggaaggggccaatgtcagcctccaggtgatttctttaatctgacattacaaagagaccaacagactgccaattctaccacattcccctggtgggtactcgactatgtagttttctctatgcttctggtcaactctgacacatcttggaattcttgtaataagaaaagaaatttttatacttttttctccttccctgagtcctgtggaccaaccctgaaatactaaaaacaagggcaataattaaagaagtatagactctttagtaggccacaggcagagcagactcccaccttctcaagcacatacaacctctctactggtgtagccccaagtgtgagaaggaaagtgggaagcggggtgctgcagactctttgacagcaggaggaatgggaatctggtagaagtataggtcaacagttctttttttttttttttggaaacggagtctcactctgttgcccaggctggagtgccgtggcacgacctcggctcactgtaacctctgcctcccaggttcaagcgattctcctgcctcggcctcctaggactacaggtgcacgccaccgcacccagctaatttttgtatttttagtagagatgggggtttcaccatgttggccaggctggtcttgaactcctgacctcaagtgatccacccaccttggcctcccaaagtgccaggattacaggcgtgagccaccgcgcccagccaacagttattaatcaggggtcttggacctctaagaattcactggatgggtttcatggagtctacgaagtatatatacagtagtttgagtttaaatgtattttcctggctgggtgcagtggctcatgcctgtaataccagcactttggtaggcctaggtgggcggatcacctgagatcgggagttcgagaccagcctgacccacatgaagaaaccctatctctattaaaaatacaaaattagctgggcttggtggtgcatgcctataatcccagttactttggaaggccgaacctgggaggtggaggttgcggtgagctgagattgcgctgttgcactccagcctgggcaacgagagcaaaactgtctcaaaaaacaaaacaaaacaaaaaggcccggctcaatgactcacacctgtaatcccagcactttgggaggctgaggcgggcagatcacctgaggtcaggagatcaagaccagcctggctaacacagtgaaaccccgtctctactaaaaatacaaaaaattagccgggcgtggtggcaggcgcctgtattcccagctacttgggaggctcaggcaggagaatggccagaacccgggaggcggagcttgcagtgagctgagatcgcgccactgcactccagcctgggcaacagagcgagactccgtctcaaacaacaacaacaacaacaaaatatattttcctggggagactcccaaaagattatatgtcttttaaaaaggtaagtcccactgttgtggatggttctggaatgttaccccagcgttactacagctcatatttcttccttattccttccatattcattcctgccagtgcctagctcccagggccatagctgcgtctgtgaccttgtgtagcctagagccaacagtgatataaatctgcattgagcttggtgagctttggtccctagggattcttttactgattttagtaagtacctatatatgaaatgatagctgggtgggttgactcatgcctgtaatcccagcactttgggaggctgaggcaggaggactgcttgagcccaagagttcaagaccagcctaggtaacaaagtgagaccttgtctccacaaaataatttttttttaaattagccaggcatagtagttcatgcctggagtcccagctactggggaggctgaggcaggcggattgcctgagcccaggagttcaaggctgcagtgagttacgattgtgccgttgcactccagcctgggtgacagagcaagaaagactctgactcaaaaaaaagagaaaaaaacactgggtgcagtggctcatgcctgtaatcccagcactttgggatgccaaggcgggcgaatcacctgaggtcaggagtttgagaccagcctggccaacatggtgaaactctatctctactaaaaatacaaaaattagctgggtgtggtggtgcatgcctgtaatcccagctactaggaaggctgaggcaggagagttgcttgaacctgggaggcaagaggttgcagtgagccgagatctcgccactgcactccagcctgggcgacagagtgagactccgtctcaaaaaaaaaaaaagaaaaaagaaatgataaactgctctagaacagagaaacttgggaaaaggaatgtttggcccaatggaaaattctggatatattcattatctataaataatgcattttattatttttcttgagtgtcattcattggctgtatgcataagaactaattgttgatatattcttttaattgaagattaacctgaattgaggattaacatgaagattaattaataataattcaggttaattgaactttaattatgaagttttcatattaccaagaaatcattaatgagtataagaaggaaagagctgggtgcagagtgtcacgcctataatcccagctacttgggaggctgaggcaggaggatcactggaagccaggagttccagatcattctgggcaaacagcgatatcttgtttcttaaaaagtttaaaaaagaaaattaagccaggcacagtggctcactcctgtaatcccagcactttgagaggctagggcagatggactgctcgaggccaagggtttgagaacagcctgggcaacatagtgagaccccatctataaaaaataaaaaattataaaaaaattagccaagtatgctgacgcatgcctatagtcccagctacccaggagactgaggtgggaggatcgcctgagcctggggggttgaggctgcagtgagacatgatccatgccactgcactccaacctgggcaacagagcaagaccccatctcctgaaaaagaaggtaggagaaacagcagcatgtttttgattgctggtatttgggtatttttgttttaacaagactaatgttgtaaagtttaacattctgtgcattgggattgcccatggctgagctctacagtcattctgaaccggcgtggtggaggtgctcatggtcatactggttgaagttttcttgaaatatctcaagtttggtgtcaagcactttatatttttcttgttgttgagatggagtcttgctctgttgcccaggctgtagtgcagtggcgccatctcagctctctgcaacctctgcctcccaggctcaagcaattcttgtgcctcagcctcctgagttactggaccacaggtgccaccatgcccgggtaatttttgtatttttagtagagatggggtttcaccatgttggccaaggtcttgaacttctgacctcaggtgatccgcctgccgtgtataggcgtgagccaccatacacggctaatttttgtatttttagtagggacggggtttcaccatgttggccagaccggtctcgaactcctggcctcaagcgagcaactcacctcggcctcccaaagtgctgggattacaagtgtgagccaccatgcctggccaggtttgttaatttctatagcaagtaggattatgccagaggaacaaattaaatattttattcatttgatttttttttaactttccctaccttcgaaaaactctgactttatatttaacatcaatggaagggacaacttcagaaaaaggtgcagtacctctagtctcatggaccgttctgcttaactcccccacacttcactgactatttcaagactttcactcacctcataattccaaccctatcatccccctcaggtgtcagcaaataagctccttactctaagaaaatggctaacatacagaaactccctcaaccttctgccaccagaacttcctccatgagcaccggtccttccctctccctcctgttccaatgagacatgtatccctgttatctaaatttctcagctgagtgaaattactcacacctaatctcagcaacctcgggaggccaaggcaggaggatcccttgagcccaggagtctgacaccagcctgggcgacacagggagacctcatctttacaaaaaaaaattaaaaattagccaggcatggtggctcatgcctgtagtcccagctactttggaggctgaggcaggaggatcacttgatcccaggagtttgaggctgcagtaagccatgactgcaccattgcactccagcttgggtaacaaaatgagaccctgccttaaaaaaaaaaaaaaaatatatatatatatatatatatatatatatatatgtaaatatgtacatttttctgccaatccaccaacttccctctcctggcttttaagaacttgctctgtcaactatccccttatatttgctacctctcccaccccatcagctctttctcattgatattttaacatgttcatacttgaccgctctttacaattcaaccctctattcctcatctttcagcctgtctcctaatggcagaaagtcttgtaaggttgcttgtatgcagagtctcattcctcatccctctgcagtcttgacttttgctccatcactcccctgaaatagccttcatgaaagacactgatgacttacaggtccgaaatctgaaaaccactttttttttagatggggggggtctcactttgttgcccaggctggagtgcagtggcatagtcacagcttactgcagccttgaactccaagctcaagtgatcctcctgcctcagcctccctagtagctgtggctacagatgcatgcaaccacactcagcttaaaagctacattttaatccctgttatatttgccttctcagcagcatttaactctatcaacagtctctttctctggccactcttctggggaggaaagtgacgcacactttgcttcctggtcttctctctaccacttcagtcttcttggcagacctctcctttattcacctcctaaatgggcctgttcctcatggctctattctgggttctctttccctgccagaggcaacactgttcattcctatggctttatttgtctgctggtgacacccaaatctataccaagacctgatccttgagctccagcgtcatgaaaacgaaagcacacatggcacttgcacttggggtgtcttctatgagtcccgtcctcatgtccaacattgaacatatgccactaccaagcactcaaaaaacccaagctctgctctcagcttttcctctaacttcccctcacaagatggtactgcaatagcctgttactcaagccagaagcctggggttcatcatgaatcttcctgccctgccctgctgtccttttatatcagttatccactgctgtgttgcaaattgccccaaaacaatggcttaagacaacagcctttctcacaattctgagttgtctggaaagctctgctggtctctcccaggctggctgaagcagctgtcttcccccagctagtatctggactcagctatggctgctaggcctctccacgtgactttcgtcttcacaggatggtggatggtctctgggctccttctctctttttttttccagacggagtctcgctctgtcgcccaggctggagtgcagtggcgcgatctcggctcactgcaacctccgcctccccagttcaagtgtttctcctgcctcagcctccctagtagctgggattacaggtgcccaccaccatgcccagctattttattttattttttgtatttttagtagagacggggtttcatcatgttggtcagggtggtcttgaactcctgaccttgtgatctggtctctgggctctttctaagaggaaagagcagaagctgcaaggtctgttgaggcctggggtcagaactctcccagtgccacttttctcacatttttgggtgaaggctaactacagggccagcccagatcccactggtggggaaataaacctcatctcctggtgggggaagctatgaagtatctgtggccagccttcatccttcatgcctataattctaccatctatttggtaaaaccaaatgaaattgccacagtttggcaatttttggcctaagcagcagcacttttatatggctcaatctaataattttggctgggcgcagtggctcatgcctataatcccagcactttggaaggccaag

SEQ ID NO: 94456 - DNA, 13470 bp, Homo sapiens
tctgaagttagctatgcttctctggtgaactctcatatttctgcttgaataaaagctcagtgtgcctctctatgcactattttgctatttccaacgtggaagacaaaaaacaaccagtattcctaatagccccatcatgaatactactcatgtacatttataaaggcatgattaaattcattgcttgatgttcacatgatgccattactttagagggcaaaaaccacaaccaacctaaaaattctatcacccactctaatgaatgaaccacaataacatgcgatcaggcagataagtttccaaacatgtggaattcaaaatctacatagaaaataagtcatgctatatgattccatgtatataagatacaaatagttgaaagtacacataaattatactgttaggagtcagagtcatggttactcctgggatagtgactgggaagggcacaaggaggtggctggggtctgatgaagttctgttttgcaacctaagacatgcacacagaggtgggttcactttgttgaaatttcatttagttgtgcactcatggcctgtgcaactattccaacttttttaaaaaaaatacatatcatcaattaaaacacaaagagggaacataaatggattagtgattttttgttgttgttgttgttgttgtttgagatagggtttcactctgtcacctaggctggagtcaagtggtgtgaccatttgactccagcctaggcaagacagtgaaacacatggccttggcctcctcctgagtagctgggacttcaggcatgtggcaccatgcctggctaagtttttaattttttgtagagactgggtctcactgtgttgcccaggctggtctcaaactcctgagctcaagcgatcctcctgccttggcctcccaaagtgctgggattacaagcatgagccacctcacctggctggattagtaatttaatgccttaatgttgtcaaagtggaggttgaaagtattaaataactttataccatgattaatattttaaagtttgttgtaacctctgttaaaaagtaagatctactgatataacccccaaataacagagttaactatgaatttttaaaatatacgtataacatagaagatgttaaaataggaagaatcagaaaagatgatgggtattctgaagaatacagaaagttggtatatccaatgccaaatatgacctttaaaatattaaacgtaaatagctaaattatgcctgtcaaagtcaaatattatttgactatattcagtcagatgttcctccaagagatacaactaaaacataatctttatatgtatttatgttttagttatatatctcttggagtagaaaaattagaagatacattatatgtaattttaaccaattaaaattaaagtagaagaagtaaagatacattatatgtgattttaaccaactaatcagtgaagatggtgatatatcagataaaaaagacaatacagttaaagtagtttaacatcattataattaatattatttttacatttcttaaagtataatcttccaatattattgcttgatgaatagcaaacatagtctgattatccccacacagttagacatatgcaggtgtttttctgcatgtatcaccaatcccttgtaacgtcagtttcacaactgtgcttataattctgtgggggatgagtaaacaactggacattgtgcaaaagtacacagtatgcatataaatgataaaatcagcggattttgtattctgtgtcaggcaaagcagagcctggagacaccagagtcacagctgatggaaacaaaaaggctgagagttggggaacacacaccattgtgagcagaaatgctcaccagccaccgcctaagaggaataaaaggagccaaaaattgacaaaaggaaaagacgatgtaaaagcatacataaatgctccccaggaccrgtatggtttaggtgactctggactcaggggaggacctggacggcaggtgggtcccatgagtgtgttggacctgcagcttgtgccggcgcaggatgaaaaccatggagcctctggcccaagccataattcccaaatccaaaacatcagggaatcagaacagcactgcacacagggagtgtgagattttgacacgaatcatggcataacagtatccattatctattttccttgtgatggctgcattgagttatagccagacgcataaagaggaaaattatttactagtgtgtttaggatccagcatgagagaatcaagtgtccaatgagctcgggaactattattctgagctctgccctactggagtccctggggaaatagcgatggcctggaagacactcaggcagcaagtgctgccaggaggaacacccctgcccagtctctgaaggaagaatagaagttcacatgaaaaatcattgaagttgttcaaaccaaagatgtcactgtctgccagatttctttagagggaatgaccaaggagttggctatgatcaggtgcatgagaatcaaatctgtgcaccttaacctgcacccagtgaggaaaagggagacataatgataaagaagagagtttcccagaatttacagagtcaaatgtgtcagtctgtcttctgctaaacaatccatcatggttgagtatcgttgaacaaagtgattcctgcacctgcagattattcaggtgattatgacatgacctctcggacagagtattccagagaaacaaaaccaatttaaattgtttaaatttaaataactcaaatcattgaattaataaattattctaatttacttaaaataaatacatgcaatgtatttatacatattaatatttaataaatgtttattcattttaagaaattggctcatgtaactatagaggctgagaattcccattatctgctgccttcaagtcagaaacccaggacactcagcggtgtcacttgaaggtttgagaaccaggagtgctgagggcaatagaagatcccttcaggagtagccccagataagggaccccaaagagtgacttcacttccttgacaatagaccccaacagaacttggaacactggaaaccaggcacccacattctagaaacagtctcttcccagctcacttggctgaagacaataaagagaactagatgtcatcctgctgatcccaatttcctatgtttctggcaccagaaaaccctgaatgataggtttttctgaagctgctgacattgggtcagccctcaatatcatcacctctagccatgttcaggaggtactcaaaggtaacactggcagctgagagcaggccagtcaatgtctggccaccaccctaatcccacctggacagtcacaccccacctccctatgtgtgttcgcacagtgggggtgatgtcatgtgggtctggcctgtcctgagcagacccaggtgttgggttgtcagaaacccagtgacccatcacattcactcctcagatcatggctcaaaagtctacagagcagagacaagagattgacaaagaggtgttgatgaggtaatgtattccatttccctaggtgaaaggcaggcacaccacactgtgaacaaggacaagtgctggactggaatgagtgcaggagcaaaatgttctctaaggtgggcacggtggctcacgcctgtaatcccagcactttgggaggccaaggtggggggtcacctgaggtcaggagttcgagaccagcttggtcaacatggtgaaaccctgtctttactaaaaatacaaaaaaaaattagccaggcatggtggtgggtgcctgtaatcccagctacttgccagcctgaagcagaattgcttaaacctgggaggcagaggttgcagtgagccaagaccacatcattgcactccagcctggacaacaagaaagaaactctgtctcaaaaaaaaaaaaaaaaaaaagttatctaatccagaacctggagggggctggggaaggccttctactgagacactactgtaaatggcttcattctgtacacacacatacacacacacacacacacacacacacgtgggtgaacaagtatgtaaaccttgatatacagatgtagatattcattctattagttctgtttctctgtcttcttgagtatagccatcttagtgggtgtgaattaacacttcattgtggttttgatttgaatttccctaatgaataagaattctgagcatcttttcatgtgctcattggccatttatgttttattgcaatatcctcatgcattgttatcaccaataattaaaacattctctggtaaagtatttttctaagttaatttacttataaaaattacaaaggcatgaagtgatttactcaatgaatgctgttgtcccatttaatttttcatgtcatatgtcataatatgagcttattctctcattggcatgtcctgtatttctgaaatgaactcttttcaatcattttgtatacctgtatattaattatacatgcaaatccatgacttacgcttgcttagttttaagttttgacataatgtatgtattaggtatcttattatttgacagaaatcactttttcctctaagttttctaatttattagcataaagttgtttgtcttagaacgtagactttttaaaaatctccatgaagttttaaatactgtttattttttaatattaagtatatcttttcacatttttattaacattgcagtaagctctattttatcattaattttattttattctattccatgtaatacttattctaaattttttacttacattatactttatgataacgcattatttaggctaagcttcttttatttttttgagacagtgtcttgctctgttggccggactggagagcagtggcacaatttaggcttactgcaacctccgcttcccaggttcaagcgattctcctcagcctcccaagtggctgggattacaggtgcccaccaccacgcctggctaatttttgtatttttagtagagatggggttgtaccctgttagccaggctggtctcaaacccctgacctcaggtaatctgcccacctcagcctccaaaattggtgggattacaggcatgagccacctcacctggccaaggttaagcttctttttataatttaatttcagagtttgacatcaaaaacacatattgtcaggcatcttctattgtagcatttgaatttgcagccatctaattttctctaactacttttgaacaaatacagtgtacaacttgaatatgaagaatttttattgtcttttcatctgaaaagttctaaatattaattaggaatattgctcagtttttaggtttagtatttaaaattgcttcataagctatttaaaaatatttaatagtggcaaggttaatctctatgattaaaatattttacattcattaaagctccctttgtgattgcattatttcaatcgttctatattgctgagtaatgcaacacatagcccaatttcgatatatgtccattaggccaaacttatgcattgtatttttcaaatatttgaattttcaagacattttacctgctttacctaacaataataagaaaatgtctgtggaaatttttcacttcagctacatgattaccccatttgttttatgattctttcaaatgggcttccttgaatatttcaaggcagcaattaccaccaactccctagaaaaagggaagcataagcctccccagggtccctggcgtcggctcctccaccgacggtgactggttccaccagattcacttcccagaggtcaccctgatgcttatttcttctgaacaggctaattgggattattgctaatacagcatagtctaccctcacagggtcccgaaaattaggcagttttcttgatgagtctcatattcatcggctgtgagtcaaattctaatgaaaacctctttctacagtcctgtgctcatttcactccacccagaccactgcatccatttttaccttaaaatatttgaaatggaccactctcctcccacaaaaaattgtgcgagaaggcaaaggaaattttaacaaaaggatcagatgtgcaagaggttcgttgccctgatactgtctgtggagatgtgcatggtcaattacatgatcttatggaactctttagaattggtggaaaatcaccagatacaaactacttattaatgggtgactatgtagacagaggatattattcagtggagactgtgactcttcttgtagcattcattatccagaatgcattacaatattgagaggaaatcacaaaagccaacaaattacccaagtatatggcttttatgatgaatgtccgcgaaagtatgggaatgccaatgtttgaaaatactttacagatctctttgattatcttccacttayaactttagtagatggacagatattctgcctccatggtggcctgtctccatccacatacacactggatcatataagagccctgggtcatttacaagaagttccacatgagggcccaatgtatgatctattacggtcagatccagatgatcgtggtggatggggtatttcaccctgtgtgctggctacacatttggacaagacatttctgaaacctttaaccatgccaatggtctcacactggtttctcgtgcccaccagcttgtaatggagggataccattggtgtcatgatcagaatgtggttactattttcagtgcacccaattactgttattgttgtggtaaccaggctgcgatcatggaactagatgacgctttaagatattccttccttcagtttgacccagcactttgttgtggcgagcctcatgttacacagcacaccccagactacttcctataaatttctcctgggaaacctgcctttgtatgtggaagtatacctggcttattaaaatatatgtatttaaaaacaaaaagcaacagtaatctatgtgtttctgtaacaaattgggatctgtcttggcgttaaaccacatcatggaccaaatgtgccatactaatgatgagcatttagtacaatttgagactgaaatttagtacactatgttctagataggtcactctaacagtttgcctgctgtatttatagtaaccattttcctccagaccgttcaagcagaaaaggtaactaattgcttcatctccttttgtgcttatttggaaattttagttacagtgtttaactggcatggattaatagagttggagttttatttttaagaaaaattcacaagctaacttccactaatccattaccctttattttattgaaatgtataattaacttaactgaagaaagggttcttcttgggagtacgttgtcgtaacatttacagatttcccttcatttaaactaaattactgttgtatgttgatctgctgcatatttctgtcatgacagtgcttgcatcctatttggtgtagtcagcaaataaacttttcattttaaacgaacaaatataagaagcatgaatacaggatctacacatcagaaaaattatagagggacagaatttttaaaaaataaccaaaactagtctcaataaagtataattatcaaggacaaaaagaaaattttacaacttgaaaataggaaaaaatgaagattaattcaaaacaaaaaaggacatgaactatgactttcttctcactttcttcattgatcattacttaagcttctttatttcatcaaacttttcttacactgctgtgcccagttaattccatgacattttttattaattggtttaaagttgcattgttccaacttattagaggcccatttttaattaataatttgcctcttaacttctccattgcaacattaacaaaatgaaaattatgaaattacaaacaaaatgaaaattatgaaagcactttgcaaaaacatttcatctgtaactgttgtttatgatacgtgaaaaatccttgaagggcaaagacggattctgagtcttatatacactgcaattgactgcccattgcggtgcttaacctgcaggaagaaatcaacaaacggccattcattatacaaaaagaagacaatccacataaatcggagaactatctgaccagcttaggaaactgtggattccttccacagcaggcagagcccagcctgggtatcctgggatggcggctcatgagcacaaaggggctgaccatgggaaaacaggcagtgatcagtgcagaggtgttcaacagccaccaactgggattaggaaaaagagacatatgtaaagatggaggagagcgagtaaagtaacacaaggtgctcaccaggaccaggatgctttgggtgactctggactcaggggaggatctggcggagaggttggtcccatgaatgtgctggacctgctgcttgtgcctgtgcaggataaaaaccatggagccactggccaaggtcatgagccccaaacacaaaacatcaagggatgataacaagacaatatgtaatgaatgtggaattctgctcctacttcctccagaacaatatccataatcatttgtctttgtgctatttatgctgttccacttgccagtcacatgtagaagaacagtaatatttaccagcgtgttcagaatccagcacaggaccaggataaaagacctgatgtatttgtgagcatgtagcttcagctctgcccacctgaattcactggggctgatggtgatgacctggaagacactcagtgcacacagccctgcccactctgtgaacataaaacacaaatttgcatccaatatcactgagggaatctttcaacccaaaagcagccattgtttgtgggattcctttagagagtataaccaaggagttggctatggtcaggtgcttgagaatcagatctgtggactgtaacatacctctggtgaaacaaaggaaactatagtggtagagaagaaagaaattccccaggaatccgaccatgatctgagataataagatcatgcctattgcaaaatccttggaggccatttgtcatttttcagtgactgataattacattcaaagtgagagaaccctgtgtggaaacataaagtttcacttttgcaaataaaatccactattgtacacttaccattgtttccaacttagacattttcttattagaccctgttttttaaataagagttttgctctaaaaagaagaacatatgcatccccatgagaggagtactatattagtgttttgcatgtaacttttacaataattctgtggtataagtgctttactatttccattttacaggtaagaagatcttacacaaggaagcttaatgaattttctaaagtaactgctttgtaagaggcagaatcaaaattggacaatgtgtttaatcactgtgtgtctcacccttggacatagtatttttttaatgcttcacacatttcatgttgtatatattgtcgctttctttaaacctggatgtagttttttcttcatttttgattgtggcaatttctcatttaaatctaagtgcttatttcatgagcaaatatcacctataatgattcagaaatccaagtagaatatagatgcactgatttagtataatcctaaaagaataatcatacaagaccaaatgatatttattgaatgcttaaatgatttcatgctgaaattaaaaaagaagattctttctcatcttaaccaagaaggatacagaaatgactgttgctaagcaaggggtcaagggacatgagtaggagataaaacagtgcaaaggagaaacaggttgtcatgaattacagataaatttagtatttgtttatgaatacaaaaatatcaaatgaaattatttcaggctgggcaccatggctctcatctataatcccagcactttgggaggccaaggtgggcaaatcatttgaggtcaggagttcgagaccagcctggccaacatgatgaaactccatctctactaaaaatacaaaaattagctgggcatggtggtgcatgcacctgtggtcccagctacttgggaggctgaggcaggagaattgcttgaaccccggaggcggaggctgcagtgagctgagatcccaccactgtactccagcatgggtgacagagaaagactccatctcaaaaaaaaaattatttcaatgtcagaattgttaggtatattaaaatataagtctattatgtaaaaggaaaactcgaggtagggaaaattattcactgaattaagtgttactaagatgagtattgagcctaagaatggcttcagaacatttttgaagacagagtaaatattaccaaataatttacttcagaaaacgactgaagtccttgatttttgttctaatatgaaaacctaaggtcatcaagatacctttccttgaccgctcctcccctgacttcatgaaagaatatggtcttttcgtcattctcagagaccagatgtttcctgtcaccacacatcacggtctccattaggtactttatatgtccagagtaggttaaagccctatgtttaatacttttgagaagaataagataatttaatcagctacatcttatacattatcacaggcatgaaggaattgtagaaatgcttccattcatcctagaaatctttctgattcttgtggaattgatagaacagctagcggattaatttccaaattattctaggaaacttttttaaaaaatgcattcttcccacttaacaggtaaggagatcttagacaagaaggatcaacaaaaacagattttgggggccaggcacggtggctcaggcctgtaatccccacaatttgggaggccgaggctggtggatcacctgagatcagggcttcaagaccatcttgaccaacatggcgaaaccccatctctactagaaatacaaaaaattagccgggcgtggtggcaggcgcctgtaatcccagctattcagcagtctgaggcaggagaattgcttgaacttgggaggcagaggttgcagtgagctgagactgcaacattgcattccagcctgggtgacagtgcaagaatccatcttaaattaaaaaaaaaaaacttaaaaacagatttttggcttcttccatcaaaaaccgacaatgacaagcatgaggattttgttaagtgagctgcagctggggactggctcatgctcttggaactttgctccctctccacaacttagcccatgacccagccattatttcctttccccacatggccttgacactggtcagtttctggcccagtggagtcctctttccacaccagagcatttaccccacctcctgacaacttcctaaccttacaggtgctctctcacagatcaaaatgtaacacacccaccaggcgcctccctgctgctgggctgtggaaaccagtgactgtcacggccagggagtgtgtggagggaggcggccaggtctgagatatgggctcgggaccctgcgacctcacctccccaccgcactgcaattatactttacctgtggcagcaatgacagtacacacttggggaattgaaaatatttttgaaaacctttgtcccagttacaattaccaaaaacaatgacaacttccctgcagcacctccagagagatggcagtgcctggagaggctctgcttttccatgatcctttgaggcagacaggggctatcttggaggaagcagaaaatgcggagtcggagacagaaggggatgacaatgaagcgcggtgggtgctggattctgtgcctcctgggatgtgtttttgctgaaactctcattttctgttactccccaaattctttaaatgaacaatcattgaattataaatagagaaatgggatcacacaagtaacttgagaagtatttgtcaacagtttacagtgccaggaagaacgtgaggttcaatattgaccaagaaaatagagacatctgtgtaattcaatgcaagttgatacacacatgtagactgcatatgtatgtgtgtgtgtgtgtgtgtgtgtgtgtgtgtgtgtgtgtgtttggaatatatgttttatcaaaatgtaactcaatagagatagactctaaactgagcaatattcatagaagaaacaaagacatttaataaggaatttcctcacacacacacaaacaccaagtttatgtagttgaaagggaaattctaccgataaagtaatccataaaccaatgctacttaaacttctcaagagttatagtgtggtcaatctttcctgaaatactttttaggaagggtttataaaggtgatactcgaaccttgcctagatttagccatatggaatactatagacaaatagaacatgcaaatttaagagtgaaaatattaaatattagaaaccattgcatcagtatattgatgcataatcaatcaccctttatcttataaagggaagtatgattcaatattaagaaattcaatgatgaaattaatcacattaattgaatgagaatgtcatgtgactatgttcatcaatgcaaaaaaaattggcagaattctacagaaaattgtgtttaatttagtaagaaattggtggaaagatttctgaaaaacatgaaaatagatttatacaaatgaaaaataatgccaccaaatgtttgggtaggagaattcaacagtattgggaagtcaataatctttaaagaaatgtatatgttgagtttgaccccaatataataccatgtgcttgtgttctgaaggtcttaaaaatgtattgctatgaaaaataaacaaaaaaatccacaaacaatttgaaatgaaaaaagaaaaaggccaggggtggtggctcatgcctataatcccagcattttgggaggctgaggtgggcagatcacatgaggtcaggagttcaagaccagcctgtccaacatggtgaaaccccatctctactaaaaataaaaaattagccaggtgtagtggcacatgcctgtagtcccagctgatcgggaggctgagattaacaggagtaaggagattttgggctgagacaatggggttttctagatatacaatcatgtcatctgcaaacagggacacgatttgacttcctcttttcctaactgaataccctttatttccttctcctgcctaattgccctggccagaacttccaacgctatgttgaataggagtggtgagagagggcatccctatcttgtgccagttttcaaagggaatgcttccagtttttgtccattcagtatgatattggctgtgggtttgtcatagatagctcttattattttgagatacgccccatcgatacctaatttattgagagtttttagcatgaagggttgttgaattttgtcaaaggccttttctgcatctattgagataatcatgtggtttttgtctttggttctgtttatatgctggattacatttattgatttgcgtatattgaaccagccttgcatcccagggatgaagcccacttgatcatggtggataagctttttgatgtgctgctg

SEQ ID NO: 94457 - DNA, 43640 bp, Homo sapiens
  misc_feature (1)...(43640): n = A,T,C or G
actgatttgagctgatagttgccatgcaggaacgcaggccaagtgtggctagttcttccaagttttcaaggggatctggaaatagggatataagaaatctcttcagttttacaagttggcagcatcttccattttttaagaaacacactgtgtgagccaagcaaaacacgtctgcaagctggcagtggtccacagtgtgccgatttgtaaactctgtcctcagactttagcattcactatagcaagaacagcaaacacatacctagtgcttactctgtgcctggcactgttctttttctttttcttccttttccttttcctttcctttcctctttctttttctttctttcttttctttcttatctttcttttttttttttttgagacagagtcccacactgtcacccaggctggagtgcagtggtgcgatctcggctcactgcaacctctgcctcctgggttcaagcaattctcctgccttagcctcccaagctcctgagtagccgggattacaggcgcacaccaccacgcccggctaatttttatatttttagtagagacagggtttcaccatgttggccaggctggtcttgaactcctgacctcaggtgatccgcccaactcggcctcccaaagtgttgggatgaaaggcgtgagccaccactcccagcccatttcatgtatatttcatttaatgtttataccaaccctataaggcagggaggtgctgttatcaatctctatttccagataggaaattgaggcacacagagaactgacttgctcaagattacacagctagagcagagaatgatcccaggcagcccagctccagaatctgctgtttgatccctatgcagtaaacctgttagaagcatgtcatccagcccttttttttatttttatttttaatttttttttgagacagagtcttgctctgttgcccaggctggagtgcagtcacatgatctcggctcactcaaacttctgcctcctgggttcaagcagttctcctgcctcagcctctcaagtagcagggattacaggcatgtgccacgatgcccggctaatttttgtacttttagtagagacggggtttcgccatgttggccaggttggtctcaaactcctgacctcaggtgatccacacactttggcctcccaaagtgctgggattataggcatgaaccgccgcgcccggccatccagccctcttgatagggaggtggggaaaccagaacagaacagagcctttgcaaagctgtccattcgtttactcaacagagactgaatgtctctggtttctgccaggcacagttctaggtcctagggatatgtatcagtgatgtatcccgataggcggaaaaaatctctacagttgaggttatggggagatcagtacatcccctcttgtccctgcaggtggccatggtggaggtgcagctggagagtgaccacgagtacccaccaggcctgctggtggccttcagtgcctgcaccaccgtgctggtggctgtgcacctctttgcactcatggtctccacgtgtctgctgccccacattgaagctgtgagcaacatccacaacctcaactctgtccaccagtcgccacaccagagactgcaccgctacgtggagctggcctggggcttctccactgccctgggcacctttctcttccttgctgaagttgtcctggttggttgggtsaagtttgtgcccattggggctcccttggacacaccgacccccatggtgcccacatcccgggtgcccgggactctggcaccagtggctacctcccttagtccagcttccaatctcccacggtcctctgcgtctgcagcaccgtcccaggctgagccagcctgcccaccccggcaagcctgtggtggtggtggggcccatgggccaggctggcaagcagccatggcctccacagccatcatggtacccgtggggctcgtgtttgtggcctttgccctgcatttctaccgctccttggtggcacacaagacagaccgctacaagcaggaactagaggaactgaatcgcctgcagggggagctgcaggctgtgtgagactggtgttagccaccgctcactgcaagcactgcctccctccggggtctgtaagaggccgcaggggcctacagacctcatccccccatcccctggctggagccacttccagtggccactctcaggcagagttcagattcctrcccgcagggtcctctgggctgggccttggggcagctcccacattcccagggattttccccatcagtctgtcccttgggttttgcaagctactctgcacctgggctggcctcagttgaaggatcatgcagtagatagaggggaggcagggagagcttgtgggaccttcagtgctgactttagccaccatttccattcctatacaggatgtgaaggtcagaaggcagccaattgttggtttaatttttttttttttttgagacagtctgtttcccaggctggagtgtagtgatacagtcacagctcactgtagcctcgaccttccaggctcaaaagatgctcccaccacagcctcccaggtagtgagtagctggtactacaggtgtgtgctgccacacccgactaatttttttgtagagacggggtttcgctgttcccaggctggtctcaaactcctgggctcaagtgaacctcccgcctcggcctcccaaagtgctgggattcctttctttatttctgtagaatctattttatggttggcattttgggggaagatttcgatgggttccacattcttgctttagttgttgtagagggatttgggtgtttctacccaaggcattggtctagcttttcctacaatgaacctatctttggaggttcaagctccccaccttcccccactgtggtgacctgtggccacttgcagaagggatggtgcctgacccactgccctagccccacgctatgcaccaaacttgttctccccgtcctggtccagggctggggtctttagagactgacagcctctgccccaggcctgagtccttagcaagggttgggtaaggaggttttaagggagaaggtccagtccttagcccttgaaatacaaagctcttctgacactgaatttggatgcaccttgttttatataataaatcgtgtttcacagatgtccctgttgctgtgaaggggatgcagggcaggccttcttaggataactttacttgttcccaagagccgggtggtggcaagtttgggtggacaggacctgggaggggagtgggtttcaggtgtaaccctgtcagatgctaacaagggccaacagcttctgaatggggagagttattccaaggctacaggctttgaactcttgtccctgagttcagagtctctatctcttccactgagtatttatttatttagagacggagtcttgtgttgcccaggctggagtgcagtggtgcgatctcagctcactgtaacctccgtctcccaagttcaagcaattctcctgcctcagccaccagagtagctgggattacaagtgtgtgccgccacacccggctaatttttatatttttattagagacggggtttcgccatgttggccaagctggtctcaaacttctgacctcaggtgatccacctgtctggcctcccgaagtgctgggattacaggcatgagccaccacacccagccctccctgagtgtttagtataagcactctttttttttttttttttttgagaccgagtctcgctctgtcttgcactgtcgcccaggctggagtacagtggcatgatctcggctcactgcaagcgccgcctcctgggttcacgccattctcctgcctcagcctcccaagtagctgggattacaggtgcccaccaccacgctcggctaattttgtttttgtatttttagtagagatggggtttcaccgtgttagccaggatggtcttgatctcctgacctagtgatccccctgccttggcctcccaaagtgctgggattacaggtgtgagccatcgcgcccagccgagacagtctcactcttttgcccaggctggagtgcagctgtgcaatcttggctcactgcagctttgacctcccaggctcatgagcctcccacctcagcctcccaaatagctggcaccacaggacgtcccaccaacccagctaattaattttttttttttttgtagagaggagggtctcactatgttgtccaggctggtcttgaactcctgggctcaagtgatcctcccaccttggcctcccaaagtgctgagattacaagtgttagccactgcacctggcctcaagtttctttcttgagcaactaccacatactaggggactttcataggttatcttatttaactctcacaacaccttaagcgttaagtctttatcattttcatttcagagataaggaaacaggcccaagaaggctgaagatcttgcccaaaaccacacagctagtccatgaaactgaacttggactatctacccctcacacgggaatctctctttgatttgagaaaaggaaccagtgcctttcaactggaacagaaaggaatctgatctcaacacctatgcctccacgtaaattatttttttcagccttatttccctcaaaattgtagagtcctaatcttcttctatcttgtggtgtgagaccttggataagtctcccttccaccttttcctattacttaaaatggtgaatttgcataaaccaggctctaagggtcttttctgcactgttcggatgtgtacaaattgacatccaagtttaaaggaagactctgaaacttaggtcaatgacttgcccaaggccatatagcgagggcctgatgtacacatatcaggagcttggggcatcctcagctcaggaaaagggacctcctgggagtgcctgcgcccacacgggatcaaaacggtgcccagccttcagaaacctcagcccgagttccaggggtaggcctgggccgctgctgcccttgtgcggaggcatcccgtgagcatagggcgccatagccaaagaagcgggcagtgggaccatgacgccaggaggacacaccagtccagtcccgttcctgtaggacctcgtttattattacaaggcccatttaagggcacttaggccccactaggctcatcagaaaaccttgaggcggtccctggatttaaccactaatggtgggtttgagtacggcaaagtagggcaccttctacaggcctcactctccccatctggcaaatgggcatcctaagcagccagacacccaagggcaataacgggaaggaaaggtaccctgcatttatgtgcgaggcggggcaaaccgcctgagtcaccgctcacggttgtgtttttccacctcccggccgtccctcccatccgggtgagtcctcgtgggtcctcccggaggcgccccctagtcccaggctctgcacgccctggccccgccccttgactcggccccgcccacagcggaatccgcagattcgccaggtcggatcctcagaattcctcgggtccctcgatactcggctgaaaattctcatcggactctgagaggagcgctgggctggaggcattttccccagggacagaagcgggctattctctcacttgggccagtaagaaaaatccaaaaaaagttgtcgactctgccagcagggattggctaacgggccgttattttcttgactccaccaaggcggatgaaggggaggctacggctgaggccgggaacagtggcgaatctgcagcctctcagaatttggcagtgcaaggaagggacggggaagagaagcaaagcggcgcgcatcctgtccagcgattcgccccgcccgcccggtgaatctgcgtctgcagaacgcgccactgaaggttccccagcgctggctggcctcctcccctccgccccgccccttttcctcagggactagtcgcagctttcrtcgccgccgattcgtcaaggtcccgggccgcagcatctagatcgtcgtggcgaagccgactctccgggggatgcggccaatctccaagctaccctgggccgcaacttccgagcctcccagggcgcnnnnnnnnnnnnnnnnnnnnnnnnnnnnnnnnnnnnnnnnnnnnnnnnnnnnnnnnnnnnnnnnnnnnnnnnnnnnnnnnnnnnnnnnnnnnnnnnnnnnnnnnnnnnnnnnnnnnnnnnnnnnnnnnnnnnnnnnnnnnnnnnnnnnnnnnnnnnnnnnnnnnnnnnnnnnnnnnnnnnnnnnnnnnnnnnnnnnnnnnnnnnnnnnnnnnnnnnnnnnnnnnnnnnnnnnnnnnnnnnnnnnnnnnnnnnnnnnnnnnnnnnnnnnnnnnnnnnnnnnnnnnnnnnnnnnnnnnnnnnnnnnnnnnnnnnnnnnnnnnnnnnnnnnnnnnnnnnnnnnnnnnnnnnnnnnnnnnnnnnnnnnnnnnnnnnnnnnnnnnnnnnnnnnnnnnnnnnnnnnnnnnnnnnnnnnnnnnnnnnnnnnnnnnnnnnnnnnnnnnnnnnnnnnnnnnnnnnnnnnnnnnnnnnnnnnnnnnnnnnnnnnnnnnnnnnnnnnnnnnnnnnnnnnnnnnnnnnnnnnnnnnnnnnnnnnnnnnngtgagtggggccgcgcggcgcgcgtgcgcggtagacctgcttgggggggtgcaacaacgcgccggggcgggaggagagggcagcggtgcgcgttccccccacccccccgcccgcattcgggtcgaagccgggtctcgggctcggtctcgcggtgtttccaacgccccgaagaggtgccacctttcggccggaggatcggggcgcggggaggagagcgggtgtgtgggagccgtggccgggctcggcccgggccgctggccggtgaggaggcgggagggggcggggcctgcagggggcgggggaggggtcttgctccgaggccaagtggggcgcgcgctagggagagcgggaaggtaagggggctcgagacgggcctgggggcctgacagtagagttgggaggtggaaagaggctgggttgttgtggcgaaacagagggtacttgggggagaatccgggggagccccgggtcagggtgagggttggaaactggagtgatgggagaacctggaatcggggctagccaatgaggaaaggcaggggagtcaggccccaagtcctgatccttcttgcgtgtccctcttcccctaacagtgtaaatgagcaaagatggatcaggaaggtgggggagatgggcagaaggccccgagcttccagtggcggaactacaagctcatcgtggatcctgccttggaccctgccctgcgcaggccttctcagaaggtgtaccgctatgatggagtccacttcagtgtcaacgtgagtgcccgggtctttggttgccatccggggagctccaggcgcccgtcctctgtgattctgttcagcacctagaacggtagcctgccttcttgaaagtgggcagttggacccagctcttctgcatgtgtgtgtccagatgggctgcttggagctccctagcctggattcaccctgagctctctttctgctgctgctttccttcctaggactcaaagtatataccagtcgaagacctccaagacccccgttgccatgtcaggtccaaaaacagagacttttccctcccagtccctaagtttaaggtaagtgtctgctgggctcctggtgtggtagtcctaagagggtgtggaggatgcgtcttggcactatagctgaataaaagggtttccaatgaaaggatctcagccagatctagcaacctctgaggctgtgagactcagttgttttggataggaggtacacttaatcttccagaaaggtgcaggtcaggtgtcctaagtgtatccctggtggctggggtgtcgacttcttgaagrgtgaggtaaagactctttagctgctatacctatcactgtatattcgtagacagtgcatcatagcacacaagagtgggatctcccagttccttgacagtcaaggggagtgacaaggccactgcctacctgggtagcactattccccgcctctcatttggcgatgtcatttccctcttgtttccttcgaggactcctattcyccaccctagacaagatattcttcaggccttgaactgggcctggaacactggtggttcttcatttccttctctgattctttattcttcctttctaaataaattgtttgtggggtcccttcattcttcttcttttttttttttttactttgtacacttcacttggacaatctctttcacacccacagcttcaactattacctaaatgttgatgacttccaagtatctgtttccagccaacatctctaggcttgtatgcctggtagggggacagtttcatttggaggccacacatgtttcagatttaagggatttaaaacaaattatctacctccttaacctacctttttcattttccctctactcatatgtggcagtaccatcgactcagctgtacagcctggcagcctgtgattctctccttttctctctcagttggtcaccgaatcctcctggctcttttcttttttattcttcatctttctattctcattgccactkaatgtagaccttggtattcatttcacctggtctccttgccttcgttcttgcctcagtttctcctctgccttgctgtcatttgtctctttggcttcactacgctgctgttttccttttgttgccaagtccatgttttgggacactgacatgtatggttattgacctggccaagccttatcctccgccttgacaccacacccctgtgttacatccacaccataacgctttgcggtttttcaaaaacaccaagttgttttatatttccatgttccaggggtccttgtcatttgatgaattgttaatccccaaatctcagtaagaatgacaccatctttatgaattcttccctgatcatactctgtacaaargtttccttccctgggctccagaacaccatgtatgcgtcagctgccactgggtcgtgttgtgtttgtatgtgcatgtcatgctgcttttctgtatgggaatctcttcctttctatctctgtatttccagtgcctcgttcatggtagttacctagtaaaggctgagctaggaaatcatcgccctgtagctcgttctctccacgtatatttattcctcagtgtgtacatttctttctttctttctttytttttttttttttttttttgagacggagtctcgctgtgttgcccaggctggagtgcagtggtgtgatctcggcttagtgcaacctctgcctgccaggttcaagtgattctcctgcctcaccctcctgagtagctgggattacaggtgcccaccatcacatccagctaaatttttttttttgtatttttagtagagacagggttttatcatgttggacaggctggtcttgaactcctgacttctggtgatccgtccacctcatcctcccaaagtgttgggattataagtgtgagctgccacacccggcctagtttgcacatttctgttcttaattcttgctgttattctgtggtgagaagaattcagggaaaaggggtcaggtctgatggatcccttattttgggccccttcccttgcccctcactttcccggatctctctcttgacttcatggagcttgctaaagtttcccgaaggacaaaggaacagtggtcagtgttgagaccccataccaactcctgttctttccccagctggacgagttctatattggacagattccactgaaggaagtgacttttgcaaggctgaatgacaacgtgcgggagaccttcctgaaggatatgtgccgtaagtacggtgaggtggaagaggtaragatcctccttcacccccgtacgcgcaagcacctgggcctggcccgtgtgctcttcaccagcactcggggcgccaaggaaacggtcaaaaacctccaccttacctccgtcatgggcaacatcatccatgcccagcttgacatcaaaggtgaggactcctctgcctgccactcaggcttggcctccagcggaggttgtacatgcaaatgcctgtcagggtcaggcaggcgcccagggtcatgatctgaaactgctggggccagttgtgtttctgaaatcagatcagattttagagtggaattatggtacatggatttttgtgtgtgtggtgtctccagcaaggtcgggcaataggccataatcaagcacataactatctgtaaaaaaaaaaaaaaatcatatgaagggttgtactaggtaagatgaatagattgtagtaaatcagcccaggtcaggttggttgcttggttggtttttgagacaggatcctgctctgtcacctaggctggagagcagtggcgtgatctttcctcactgcagcctccagctcctgggctcagccaccccagcctcctgagtagctgggattatgggcatgcaccaccacacctggccaaagtttttttgattatttgcagagatgaagtctcactacactgcccagcctgtttttaatttttttttttttttttgagatggaatctcaatctgtcgcccaggctggagtgcagtggcacgatcttggctcactgcaacctccacctcccaggttcaagtgattcttctgcctcagcctcttgagtagctaggattacatttatgcgccactacgcccggctaatttttgtatttttagtagagatagggtttcaccctgttagccaggctggtcttgaactcctgacctcaagtgatctgcctgcctcggcctcccaaagtactggtattacaggcatgagccaccatgcctggcctctttttaatctttctatatgctattctataacccatataggttttggtgccagattctcagaaatactggattttctgggtttttaggtttggaaatttgagatagagagtaaaggagctgtgaacacaagcgaggtggtctgggcttctgtgttgagtgatggggagcagtggggtctgtggcgagctgcagattgcagtattgtctggaggaggcagccattagtaggcactggccagtttgcaagtggaaatgaggtttaacattcttgaatttggtttgtaaaagaaagccagggccgggcatgcggtggctcacgcctgtaatcccaagactctgagaggccaaggtgggcagatcacctgaggacaggagctcgagaccagcctggtcaacatggtgaaaccccatttctattaaaaataacaaaaatccggacgtggtggttcatgcttataatcccagctactcgagaggctgaggcatgagaatcacttgaacctgggaggtggagattacatcgtgccactgcactcaagccagaaatttgggtttttgtgtgaaatctcatggtttttaaataccatgtttctttcctcacaaggtgtttctgaggtgttcactccacagctcctgcaggctccgttagtcccccggttgctgttctgcatgctttagtttacaggataaagagcatggggtgatcgagcctctgggtttgaattccaatttttccaatgaccaattctgtgactttgtgtaggtcgcttttaagcctctagaacagaggtactgatgcttcccttctggtgatccaacatggtaaaataagtagaagtgtttttgataaatcgtgaagtgtcataaaatatgttgtttgtrgtagtttagaggtagagataaggtagaargtcccaaaggtagagttatggtaggagaactgaaatcctgaaaccmagattccaagaaattgtaggaaacttgaggccwgagaaagcaggaataccagatcaggaaggagttagtatctccatctgacaattggttcccatttccctccctccaggacaacaacgaatgaaatactatgaactaattgtcaatggctcctacacccctcagactgtgcccactgggggcaaggccctgagtgagaagttccaaggctcgggtgcagccactgagacggtgagaagtttgtggctaccacagcccctagccatgtgggcatggtgtccgggtgcccggagcaggagcagtcttcgggaggttccgggctttcccgttaaacaaagaagagccaagcaaagctgctgagatgctttcaaaagacagggaactaggggccaggcacagtggctcacgcctgtaatcccagcacttygggaggccgaggcgggtggatcatgaggtcaggtgattgaaaccatcctgactaacacggtgaaaccycatctctactaaaactgcaaaaaattagccaggcatggtggtgggcgcctgtagtcctagctacttgggaggctgaggcaggagaatggcatgaacccgggaggcggagcttgcagtgagccgagatcacgccactggactccagcctgggcaatagagcgagactccgtctcaaaaaaaaaaaaagggaactaggattcctggtttgggaaagggcaggtctcaagtggtgtttgagcccattcctctctccttgccctgctctgtcgctctaggccgaatcccgccgccgctcttcctctgacacagctgcctacccagcaggcaccactgcggtgggcactcctggcaacggcaccccytgctcccaggacacaagcttctccagcagccgacaagataccccatcttcctttggccagttcacacctcagtcctcccaaggaaccccctacacgtctcggggcagcaccccctactctcaggactctgcctactccagcaggtacagagcagaccccgcctggggccccgcccgcaaagtctgggagctgccactgggaagaagatgcccagagtctgtctccaagagggagttggaaataatttgtcctagtttctctgtggattcagtcaacaaattgctgtcctcggggaacacactagctaggaacccaacatatagctcttcttttggagggcagcatagaggggctttgggccctgggacccagtacgctgtggtttggtcatagagagctgagtccagctaactcccctgcttcttctccagcaccacttcaacctccttcaagccccggcggtcagagaacagctaccaagatgccttttcccgccgccacttctctgcatcttcagcctccacaaccgcctccacggccatcgccgccaccactgcagccactgcctcatcctccgcctcttcctcctcattgtcctcgtcctcctcgtcatcctcttcctcctcgtcctctcagtttcgtagttctgatgcaaactacccagcgtattatgaaagctggaatcgctaccagcgccatacttcctacccaccacgccgggccacacgggaggaaccccctggagccccttttgctgaaaatacagctgagcgcttcccaccttcttacacctcctacctgccccccgagcccagccggcccaccgaccaggactaccggcctcctgcctcagaggctccacccccggagcctccagaacctggtggaggcgggggtggaggagggcccagccctgagagagaagaagttcggacttccccccgcccagcctcccctgcccgctctggctccccagccccggagaccaccaatgagagtgtgcccttcgcccagcacagcagcctggattcccgcatcgagatgctgctgaaggagcagcgctccaagttttccttcttggcctctgacacagaggaggaggaagagaacagcagcatggtccttggggccagagatacagggagtgaggtgccttctgggtcagggcatgggccctgcacaccccctccggccccagctaattttgaggatgtggcacctacagggagcggggagccaggggctacccgggagtctcccaaggcaaatggacagaaccaggtgaggttggggtcagccagaggaggcacctgggctctgggagtcagggttgggcctaggggagagggaagggaaccagatgagaaagtagggcttgggtcaggcagaagccttctgtgaccctcttctgcccccgcaggcttctccatgctcttctggagacgacatggagatctccgacgacgaccggggtggctcaccccctccggccccgacgccccctcagcagcctccgccacctccccctcccccgccgcctcctcctccctacctggcgtcccttcctcttggttatcctccccaccaacctgcctacctcctcccacccagacctratgggccgccgccccctgagtaccccccacctcctccaccacccccgcacatctatgactttgtgaactccttggagctcatggaccgacttggggctcagtggggagggatgcccatgtccttccagatgcagacccagatgttaactcggctccatcagctgcggcagggcaagggattgattgccgcctcagctggcccccccggtggggcctttggggaggccttcctcccgtttccacccccgcaggaggcagcctacggcttgccgtatgctctatatgcacaggggcaggagggcagaggggcatactcacgggaggcctaccacctgcccatgccaatggcagccgagcccctgccctcctcctcagtctcgggagaggaggcccggctgccacccagggaagaagcagagctggcagagggcaagaccctcccgacagcaggcaccgtgggccgtgtgctcgccatgctggtccaggagatgaagagcatcatgcagcgagacctcaaccgcaagatggtggagaacgtggccttcggagcctttgaccagtggtgggagagcaaggaggagaaggccaaggtgaggccagcgcctgggaccggggagccctgggctttgcaggaggaaatgggcctctggctcctccaggctgcacagctcagaggagacaagtgatggaggcgagtggagagaggccgcaggccctgcaggccaccctgggtgggcaggggagttgaggggacagagaagcaggcacagatgggcctgggaggcagcagagctttgtcctggctccattccttgctggcttgcagtggacaaggcccttagctctcttcaagctttggtcttccattttgccacttgtgaagtgggaatggtggctatttcttaagactggtgggcgaaatgacagacttttgagaaaatgccgtgcgggggctgggacaggtgtgaccaagatatggagcagcaagtagatgcgttctgtattcctggggtccgggagtaggtctcaggcaggagggaatgcctgggttctgggcgctggggctcagccccactgctgcctgcagccattccagaacgcggccaagcagcaagccaaggaggaggataaagagaagacgaagctgaaggagcctggcctgctgtccctcgtggactgggccaagagcgggggcactacgggcatmgaggctttcgcctttgggtcagggctgagaggggccctgcggctgccttcattcaaggtactcagaactgtcgttttgtggggtagggtggggagagggagagggggcccccttccttggggtaggggtggtcaggaaccatgagtgtttgagttttttcttttttttgagatggagtcttactctgttgcccaggctggagtgcagtggcctgatctcagctcactgcaacctccgcctcccgggttcaagcgattctcctgcctcagcctcccgagtagctggggttacaggcacccgccaccacgcctggctaatttttgtatttttagtagagctggggtttcactgtgttggccaggctggtcttgaactcctaacctcaggtgatctacctgccttggcctcccaaagtgctgggattacaggagtgagccaccgtgctctgcctgagtgttygagctctaaacaggccccatcttttccccatcccccaggtaaagcggaaagagccatcggaaatttccgaggccagtgaggaaaagaggcctcgtccctccactcctgctgaggaagatgaagacggtgagcagggtcaggcataaggagaaggggtgtgctgcgtgggttctgatgggagagcaagaggtagggatgaaggggtcaggtcgtcctgagggcacagccaggtggaggtgcagggttgaaatgcagcagttctgagaggtatgggatgcaccaggtagagttatccccggattgtagttgcaggtcttcctctggtctgctgatttacattttctgtattttgggtttttccatccatgaaattcagtgtctggaatcacagaattccgagttaaacgaggcatctccccaagtttcccacctgatgctaatgccctcctaccaccttcctcctagtttgcctgagtttgagcccttgcttgatagctaccatggcctggaaacttgcccattgagtcagatctgcttccctggagacccactggccttcatactcttttcttgggccaggcataacaagtcagctccctcttccacccgaccagaaaatgatacaagatcaaatggacaggacatatttaaaactgtgtgggctgggcgcagtggctcctgactgtaatcccagcacttccagaggctgaggcaggaggatcacctgaggtcagaagttcaagaccagccaggccaacatggcacaaccctgtctctactaaaaatacaaaacagccaggcatggtggtgttcacctgtaatcccagctacttgggaggcagaggcacgagaatcacttgaacccaggaggtggaggttacagtgagccaagattatgccactgcacttcagcctgggtgatagcacgagactgtgtctcaaaaaaaaaaaaaatacatatatatatatatgtacacacacatatgtatatacacacaaatatatacacacacacatatatatatacacacatatatgcgtatctgtatatattaaggccaggcagggtggagctcacctgtaatcccagcactttgggaggccgaggcgggtggatcacaaggtcaagagatcgagaccatcctggccaacatggtgaaaccccgtctctactaacaatagaaaaattagccaggcgtggtggcgggtgcctatagtcccagctacttgggagactgaggcaggagaattgcttgaacccgggaggcrgaggctgctgtgagctgagattgtgccactgcactccagcctggcgacaaagcgagactccgtctcaaaaaaaaawatatatatatatatgccaggcacgatggctcacgcctataatcccagcactccaggaggctgaggcaggaggatcacttgaacccaggagttcaataccagcctgagcaacataggtagaccctgtctctacaaaaatttttaaaaattagctgggtatgattgcatgcccctgtatagtcccagttactcaggagaccgaggcaggaggatcgcttgagcccagcaggttgaggctgcagtgagctgtggtcatgccactgcaccccagcctgagtgacagagcaagaccccgtcccaaaaacaaaaacaaatacaaaactatgaaacatgaggtaactgaggtgtttgagttcctctggtgagcttccaaattctcatctgtgaaatgaagaccatcaggaagattggtaatagtatatgtaaagccccttgcacagggcaagtatcttgtggttgatggtaaatttccccaactaccactctgctggcctagaccctgaacaagagaaggaggctggagagccaggacgtcyggggaccaagcccccgaagcgggacgaagagcgaggcaagacccagggcaagcaccgcaagtcctttgctctggacagygaaggggaggaggcatcccaggagtcctcctcggagaaggtgagggcccgggcgccrgctcctggccgaagcctacttcccatagccagcatctttgtggttggagcccaggcagctgtgcctggtgtaggaccagttgtccccttcctgttagtccycatttgtcttttttcttaaggatgaggaggatgacgaggaagatgaggaagatgaagatygagaggaagctgtggataccacaaagaaggagacagaggtgtcggatggtgagcacaagacagtgaaatcgactttgggctcggaggaggggttcggctgcctggctagcccttttctgagcccacatgaccttcctgctgggcttgtgggtcacctttgccttctgcaagggcatctgtttgggccacattcttaggaacccttggccccttgacagcaataagctcagtgctcaaaatgctccctcctgctccctcttctgctgagacatagctgtccaaaaggacagcctggcagaacgctttttttgttttgttttttgttgttgttgttgttgttgttttgagagagtttcgctcttgtcgcccaggctggagtgcaatggcgcaatctcggctcactgcaacctccgcctcctgagttcaagagattctcctgcctcagcctccgttgtagctgggattacaggcacccaccaccacccccagctaattttttgtatttttagtagagacagggtttcactatgttggccagactggtcttgaactcctgagctcaggcgatccacccacctcagsctctggaagtgctgggattacaggcgtgagccaccacacccagatttttttttttttttttgagacagagtctcgctttgtcacccaggctggagtgcagtgatgtgatcttggctcactgcaacctccgcctccctggttccagcgattttcctgcctcagcctcccaaagcgctgggattacaggtgtgagccaccacacctggctaatttttgtatttttagcagagatggggttttaccatgttggccaggctggtcccaaactcatgacctcaagtgatccacccacctcggcctcccaaagtgctaggctttcacctgtgagccactgcacgcagcctcttgcagcagtcttgactgatttccctgtctctctttctgtccttctccctctgttccagtccattttccaaactgcttatagaatctctttcctaaaatgcactcctgaccctgtgacttccctccataaggtccttcctggcaacttgttctccacagggtgtccccccaggccaacaccatgggccgtttatctcctggccctgctctgttcagctccatctcgccctcctccagtccgctccccagctgccaccaccttctagtctaacttatccaattctgttcctcaaaaactgtgaaattcttcagttttttcgagtccttcccgtacrtgagcagtctcagaatatagagcctgtcgtgttttttaaccttttcagcccagaatcctttttcacccaatccttcgtccagactgggtcctgagacccactttaggaaggtttgagtgccagagcagcctgcttcccagtctccaagcctccacttcctcttgcttccgacatccctgtgcagtccccatgtctgtgtggtggactccttgtccttgagttcagcttgtcccctgggatgctttccttttcgggcctcttcagacagagtctggggcttcctttgccatcctccccgcatgctgatgtttatctcacagtgaaaatggtttgcttatgcagctccttggtctgttggacttccccgtccctagcccagagcccagcatccacagcagggagtgagtgaggagcccacggctggccaagtgaggtctgcccacctctcctgactgccccttctggatttccaggcgaggacgaggaaagcgattcgtcttccaaatgttctctgtatgctgactcagatggcgaaaatgacagcacatcagactccgagagcagcagctcttccagctcctcatcctcctcctcctcctcgtcctcatcctcctcgtcctcttcatcctctgagtcctcctctgaagatgaagaggaagaggagcggccagcagcccttccctcagcctccccgccccccagagaagtcccagtgcccacgccagcacctgtggaggtgccagtgccggaaagggttgcaggctccccagtcacacccctgcccgaacaggaggcgtctccagcaaggcctgcaggtaggtgccacagggctgtcggttagatcgctgtgtgtgtgagagagagagagaaaacagtggtgcttgcatttattgtgtacaagtgtgtgactttattagaaaaacatacaaagaaaatgtcaccatctcctgtcactaccttctagagacattgattgtctgacacacttcaaactgtaccgtcatggtggtttacagaaccccaggctaagctgcmtactaaagtaaaatgggttggtctcttctcaagtaaattaaggagaaagtgcccagttgaataagttcttcctcctaatttttcttaagcctgttcttcagtgagtagtgaacaagtgcaggttattaaatgggcaaataggtagaaaacaagtattaacataacacagaacttggtcctagctgcttttctttgttcatttgtacgtctagttgttatactctagcacattcgcatagcttagcctgctgagggaaccgctctttcaagcagtagatatttttttgagtgctcatcgcagccaaacagtaggtgcaggggatgggttgctgagcctcacaggcagtgttctcactctcatcatgcttacagtctacagggaaagacatcttcattgagtaagaaatacataggaggccgggcgcggtggcttacgcctgtaatcccagcactttgggaggccaaggcgggtggatcatgaggtcaggagatcgagaccatcctggctaacatggttgaaaccccatctctactaaaaaatacaaaaaattagccaggtatggtgacaggcacctgtagtgccagctactcaggaggctgaggcaggagaatggcgtgaacccaggaggcagaggcttgcagtgagccgagatcgcaccactacactccagcctgggcgacagagcgagactctgtctcaaaaaaaaaaaaaaagaccagcctgggcaacatgatgaaaccctgtctctacaaaaattacaaaaactagctaggcgtggtggcgcacacctgtgatcccagctgctcgggaggctgaggtgggaggatcacttgagcccaggaggcagaggttgtagtgagccaagatcacaccactgcactccagcctgggtggcagagcgagaccctgtctcaaaaaaaaaaaaagagagaatacctaggaaaacctgtrgttacgaaccatgagaagcaccaggaagaggcacagggcagccagccggagcacatctgcaggaggaggaaggcttcctgctgaggtactgctgggctgaagtctgggcaaagcaggcagcacggctggcttagcgtgtgcaaaggccctccagcaggggaagcagcgggttggaagactggaagaaagccgacccttcagagggttgagcacaagggggcactggggtggctgaaactggagaagtgagtgagagttgggcccagcagacaaataggccagccatgtcaggaatttggcctttattttgaagtagaaacccatcagaggaatgacatggtcagatgtatgtttcgaaaaaatgcagtgcagagaaagcttggaaaggggccacagtggatgtagggcgcttcttaagtggctattgtagaatgtaaggcgaattatggtgatagcttggacttagggtgttgcaaggatagatcaaataagtcagtgttcaagatgtgctatgagctttaggaggccgaggcgggcagatcacttgaggtcaggagttcgagaccggcctgatcaacatggcgaaaccccatctctaccagaaaatacaaaaattagccagatgtggtgttgtgtacctgtagtcccagctacttgggagatcgaggcacgagaatcgcttgaacccgggaggtggatgttgcagtgagcagagatcatgccactgcattccagcctgggcaacagagtgagactccatctcaaaaatcagatgtgctgtgaagatgtgcatggcctcccggggtctcccagttgcacgttgttgagaatccgtggtctgagataggcagtgcccacaggaagacctcctcaccctggtgcactctactaagctccagaccccatgagaggggagttgaggcgctcattacacctcagatgactctccaacctcttctgggcccattgggtagcagaagggcctgtggggtcaccggcaggtcagaaggcatggatcttagtcctcttccattctcatcagagcaggaaggagaggggcctgaccatatctgcatttcagaaagcccattctagcaggaggaggagagatttggaagagaggagcaaggaggtgggtgacatgaggaggtttgaaaggatgcaggtgagatttaatggcatgaaccaaagccgagcggttctaatgtggcagaagagtggagtggaaatgggggtgaggattggagggaaatttaggaggtaggatgatttggttaaacttccccaggaaaagaaacttgggaagaaaaccaggattaggaagaaaactgatgagtgtagttgaggttgcatttgaggtgccccttgggcttcccagtagaaacagtggcagttggatccatggatctggggtctggaaagaacggtaggctggatatgaggtcggtgcttaggtcttgaaagtgtagcagtgaattcacctatagacccaggtaggcgagtggggggagagaaagggcagagccttcccatcctgtgagagcagtgggcaagcagggcccgaggaggctgagagcggtgaccagaggcgagaagggaagcaggtagtggagaggctctgcaaagcagggagtggccttgtatcaccaggccaccagcaaggctgagataggaagtatctgttgcatttgacagttaggaggtcattggtgaccttatcaatttcagttgagtggttcagactgaagccaagttacagggtgttaaggaatgaggggaggkcagttttctggaagggtggaccactcttgctgagatagaaaggagagttggggccgggcgcagtggctcacacctgtaatcccagcactttgggaggctgaggtgggcagatcacttgacgtcaggagttcgagaccagtctagccaacatggtgaaaccccatcttaactaaaaatacaaaaattaggctgggtgcggtggctcacgcctgtaatcccagcacttgggagggctgaggcgggcagatcacgaggtcaagagatcaagaccatcctggccagcaccaacatggtgaaaccccatctctactaaaaatacaaaaactagctgggcatagtggcacatgcctgtaatcccagctactcgggaggctgaggcaggagtaatcgcttgaaccggggaagcagaagtagccatgagccgagatcgtgccactgcactccagcctggtgacagagcgagactgtctccaaaaaaaaaaaaaaattagccatgcatgctggcaggcgcctgtaatcccagctgctcaggagcctgaggcaggagaatcacctgaacctgggaggtggaggttgcggtgagccgaaattgtaccactgcactccagcctgggcgacagagcgagacttcgtctcaaaaaaaagaattgggggttgtgatatcagctcccatgtgtcaagtacctatgtgtgccaggctctaggcatagcatgttgacaattcattttctcattgaatccccacaacctctcccttttttttttttttttttttgagatggagtctcattgtgttacccagccgggagtgcagtggtgcaatctcggctcactgcaacctccgcttcccgggttcatgtgattctcctgcctcagcttcccaagcagctgggattacaggtgcacactgccacgcctggctaattttcgtatttttagttgagacagggtctcaccatgttgcccaggctggtctcaaacccctgacctcaagttatcagcccactttggcctcccaaagtactgggattacaggtgtgagccactgcgcttgccccacaacctccctgtgattcccattttatagatgagggcttcaaggcttagtgagatgcaggaacaaactaaggttaccagccagagctggagagagagcaagaagagagggcagggttgagggaggggttagcttttccaagtagatgaggtttgggcatgttccactgaagggaacgggccaggtagatgtgccgggagagaggaatgcttgctggcatggcctttttggggaggtggaggagtagcttccagatctgatgcagttatacccttcggtggggaggcagggagatgggggtgttgtgcctgagtcctcttttgaccctgtgctgtaggactgtgagaggaagagtggagtaagaaccttggaaagtggagaaaagttgctccagtccaggcgcggtggctcacacatgtaatcccagcactttgggaggccgaggcaggaggatctcttgagcccagaagttcgagaccagtctggctaacaacaacaacaaaaaaagccaggcatagtggcacatgcctgtggtcccagcttctggggaggctgagtcgggaggattgcttgagcctaggaggttgaggaggctgcagtaaacagtgattgtgccgctgcactgtatcctggagacagagcaagcctctcgcctgggcctccccatgctggaaggccttgccagagctggggcctgggagtgaggggagaagaggctgctggctggctccacagggtaaaggtgtggtggaatgatgaggacctggggctgtgctgggacaggagagggcaaagtacgggccctggggtctgggcagggtggaggaggaagttgggaagagggtgatgtgctagagggaaactgaaggatgggaagttgaaggtgcagtggggcagactgaatggacagtggggaatgttggagaggatggggaatctccaaggcggagccattctgggattgacaaggccaggtgtgtggctgcttgaggggagctgagggtgattgaaggggatcactggagatgcaagaatccaggtaaacaggcgtgattgccaagtcccctggggaggtggcagaggtggaagaggagaggaagatgcaggcagccccttggtgtctggatagtgagagggcacgacaagggagtctgagttaccgaggacagaggagccgtggctcagagcaaggggtgcttagtgaaggctcactgtgtttcttctcttttttttttgagatggagtctcgctttgtcaccaggctggaatgcagtggtgccatctcgacttactgcatcctcagcctcccaggttcaagtgattctcctgcctcagcctcccgagtaggtgggactaaggcacgcgccatcacgcccgctaatttttgtatttttagtagagacgggatttcaccatgttggtcaggatggtctcgatctcttgacctcatggtccacccgcctcggcctcccaaagtgctgggattacaggcgtgagccccctcgcccggccagctcaccgagtttctaataaccagaaccagtttcagtcaccaccgtcttagtgattgccgcctggggatgttagtgatggccctggggaggggcaggttatgcagtaggaactggcttctggggcctcgccccatggacctgagcgtggcagtagagcagttctcagaggaaggtggtgggagtcatattgactgggcaggtgcccccaaaagttgtctcctaaatgagagggatgggcaggttccctttgggacagtcgcagagggaagtgtgtgtgcagcagctgtgctggtggaggagtgtgttcttcgagcgaggcttcccgaggacatgcatgctgaagcgtgaggtggtctgtagggggcgctgccccagcgtggtggggaggaaggtgagaggaggcctgcatgcatctgggtcctcactggcttcctggagtgggttgctgccacaggctgagaccccagcgggtgtctagagcctaaggtgcagccaagagcctggctcagggcgccagggttgggagtgcggtggactcaggtgaatcgctgcctcctagggccgggcctggtgccggcggccctgttggcgctgagcggggaagccagttgtgaagccagtgagtccgtgggctgcagttcagagcatgagctcaacccacatggcctgggagcagagcttgttctgtcatctggtaactgaccacatctctgtgcctcagttttcctgtctgtaagataggaccctctgctgggtacagtggctcacgcctgtaaccccagcactttgggaggccgaggcgggcagatcacgaggtcaagagatcgagaccatcctggccaacatggtgaaaccctgcttctactaaaaatacaaaacttagctgggtgtggtggtgcatgcctgtagtcccagctactcgggaggctgaggcaggagaatcgcttgaacccgggaggcggaggttgcagtaagccgagattgcgccactgcactcccacctggcgacagggcgagaccccatctcaaaaaaaaaaaaaaaaaaagataggaacctctttgggctgttgtgaggattacatgagttactctacgtaagaggtgtgattggtgttaggcacaaaatccattgggctggctctgagagcctcatgcaggctttcccagggatggcggccaagggaggatgcactccccgtcctgagggtacgctggggaggcagcacccccagctcggagccagtgtgttccctccccagccacccgcatcctgggatctccactccagcccygcttctctagcagcgctgtctcctgcccctccctgcagggcatgttcaaattctgtaggggatggggaggaaggcaagtttcataaaatattttaatacaaagatgccactttttaggttgtatcgtgttcaccttgctaaactgagaatattgtttatgatggagataatggatattttagctgaaatgtggctgactgggtccttggcatgtgacatggctggggcctgggcacagggctgtcccgccagtctgggtaggaaagtggagtccagggcgagtggtgccgcccttctcagcgtggttacagcttgttgtgatggtgtctcctgttggactgtggctccgggaggacatggaaggtgtgtgtgtggactccgagtgtcccacacacgtgtcacagcgggaacgaatgggtgggaaaccccctctcatcaagggagttcatcttgctgggatgtggggctgaggccagggcgtctgtgttccctccggggttcctgggcggaagtgggggagagcacacagcctgtggtcatgggcggccagggtggctgagcctgggtctccctgacctcctttccttcctatgtgcttccttcccaggccccacggaggagtcaccccccagtgcgcctctgcgtcccccagaaccacctgctgggcccccggcccctgccccacgccccgatgagcgtccctcttctcccatccccctcctgcccccacccaagaaacgccggaaaactgtctccttctctgccatcgaggtggtgccagccccggagccccctccagccacaccgccgcaggccaagtttcccggcccagcctcccgcaaggctccccggggcgtggagcggaccatccgcaacctgcccctggaccacgcatctctggtcaagagttggcccgaggaggtgtcccgaggaggccggagccgggctggaggccgaggccgcctcaccgaggaagaggaggctgagccagggacagaggtggacctggcggtcctggccgacctggccctgacccctgcccggcgcgggctgcctgccctgcctgctgttgaagactcagaggccacagagacatcggacgaggccgagcgccctaggcccctgctcagccacatcctcctggagcacaactatgccctggccgtcaagcccacgccccctgcgccagccctgcggcccccggagccagtgcccgcacccgccgccctcttcagttccccagctgatgaggtcctggaggcccccgaggtggtggtggctgaggcggaggagcccaagccgcagcaactgcagcagcagcgggaggagggcgaagaggagggggaggaagagggggaggaagaggaggaggagtcctctgacagcagcagcagcagcgatggggagggcgccctccggaggcgcagcctccgctcccacgcccggcgccgccgccctccgcccccacccccgccgccaccgccccgcgcctacgagccacgcagtgagtttgaacagatgaccatcctgtatgacatttggaactcgggcctggactcagaggacatgagttacctgcggcttacgtacgagcggctgctgcagcagacaagcggggctgactggctcaacgacactcactgggtccatcacacaaatatcctgagtgtgggcggccttccccgggcttgggtcctcccccgacccctccaggcacctgcatctgtgccccactctgtctgcctcccctctggctccaagccatcttttctctcctcctggtgcctcttttctgccttccaaagcatttctggcaggaacgatggggctggggcttcctcccctgtccctcacctgggtatgctcagcggcgtgggccccgccctctcctttggctgggacgcaggtggccagagaggagccgttctcttccttaacaccctgcactcaccaacctgaccaccccaaaacgcaagcggcggccccaggatgggccccgggagcaccagacaggctcagcccgcagcgaaggctactaccccatcagcaagaaggagaaggacaagtacctggacgtgtgcccagtctcrgcccggcagctggagggcgtggacactcaggtgggcctaaccccgccgccgcgtcctcctgccactcacttccctgccctgctcacctcctccctgccgtgtgtctcacaggggacgaaccgcgtgctgtccgagcgccggtccgagcagcggcggctgctgagcgccatcggtacctccgccatcatggacagtgacctgctgaaactcaaccagctcaaggtgaggctgggctgcaggaggggctgggtggggtggggtggggcaggaaggggcagaggccaggggaccacccagcaggctcctgtggttccctcgggtggagttggggggtaagcagccagaacaccctctgcccaggaagtctgtgggaagagtgagggtctggggtgtgggaggtgtctggcagttgagtctcccttctgccccccagttccggaagaagaagctccgatttggccggagccggatccacgagtggggtctgtttgccatggaacccattgctgctgacgagatggtcatcgaatacgtgggtcagaacatccgtcaggtgaggctgcactcccagccccgccccggcttctgatgcaacaagacagcatgggggctcacacacatgctgtttgtccggttaaagccttgcacactccctaaccccggtacctagccagtgagaccagcctccctccggtgtggtcagcaggtgtcagtggtccagcaggaggcatggctgatggcactgctccctttctttttttgttttgagacatagtctctctctgttgccaggctgtagtgcagtggtgcgatcttggcacactgcaacctctgcctcctgggttcaagcgattctcctgcctcagcctcccgagtagctgggactacaggcgtgtgccaccatgcccagctaatttttgtatttttagtagaaatggggtttcaccatgttggccaggatggtcttgatctcctgatcttgtgttctgcctgccttggccactcacaagtgctgggattaacaggcgtgagccatcgcatccagccaagcgctgctccctttcaaagggcctgggaagcgggaggacaggcactgaacaagtatccacacagaaggatggtgttccagcctgagcaatattgccagaccccgtttctgcaaaaaatacaaaagctagccgggcgtgggggtacatggctgtggtcccagctacccaggaggctgaggtgggaggatcactcgagaccacgaggtggaggctgctgtgagccaagattgcaccactgcactccagcctgggcaacagggtgagaccgtgtctctagaaaaaacaaaagccaaaaggatggcatttggtattaacaagatcttaacaagatctggggagttgggctatgggaacacacacctggggggcctaagaccttccagagaccatggtgcttgagtaaagctgaaaggagctcgcaggcccagacaagtggtagtgtgtgtgcgcttggttgcgagacaccatgtgcacaaacctggaggcacggtcgtcttgtgagagtgtggaggtcagcttggctcattagaaaccagggccatggccaggcgcggtggctcatgcctgtaatccgagcactttgggaggctgaggcaggcagatcacctgaggtcaggagttcgagaccagcctggccagcatgctaaaaccccgtctctactaaaaatacaaaaattagccaggcgtggtggcaggcgcctgtaatcccagctactagggaggctgaggcaggagaatcgcttggacctgggaggcagaggttgcagtgagccaagatcgcgccattgcactccagcctgggcgacagagcaagactccgtctcagaaaaaaaaaaaagaaaagaaaaaacagggtcagtggcagcgacgtgtggctggagggaacagagagcccagaccgcacgggcttgggagcctgtgaatccacttgggcctgtggtgagagaggaggaaagtcccggagctttcttcaggagagggtccttccgcaggagagggccccatggctagtgagctccatgtctaggctgacaccagtatccaggcaaaggcaagggtggcccgacccaagcagtggcagcagaggtgacagagaggaggctttgggtgcaaggtggttggctgggctcagcagtgagagggtgagggggacgggaggccctctctcggtgctgctcttagctgctgggagtatgatgggagggccagtgagatgggtgtgaggaggaagaacaaatatatggtcaagatgagctccagtctggacatgtggggttgcaatgccccagggacatctaggggatgacgcccagcagctccactgaggtggcttttggctggaaatggaagtttgggaggagtccccaccacatagctggcggctgaggctctggaagggagtgaggtcacccgaggagggcgtgcagaggctcctcactgtcttctgggaagtaagggttgctcctcacacggaggtgcggggcctgacatgggcggcctgccatttgcattagccggtggcagccaacaggtgcctgttttggagagaggtccagggaggagagatgagcagggtgccgttggtgacatggccagtcatttcaggagctgccccaaccccagacttgccccagcagtccgggaccccactgtgaccaggcagatgctcgaaggagtcagtggctctcttacccagtgcagatttccctggagttccctgcgggtgacttagaayggccaccagaggcttaggatgctgccccaaagagggagggctcctggaagcagagtcgagagagtcagtgccgggttagcgggagctggaggcagagctgcagctccaggcctggtgggcgtggacctggggtgctggctggcaggcgtgctcaggggcaggaagtgggggactcttccctgaccatcgcatctcaccctggcagatggtggccgacatgcgggagaagcgctacgtgcaggagggcattggcagcagctacctgttccgggtggaccacgacaccatcatcgatgccaccaagtgtggcaacctggccagattcatcaaccactgctgcacggtgcgccaggggccagccggggcaggagttgggggtcggtgggggtggccacggctcacacgcccttccatccgcagcctaactgctacgccaaggtcatcaccatcgagtcccagaagaagatcgtgatctactccaagcagcccattggcgtggacgaggagatcacctacgactacaagttcccactggaagacaacaagatcccgtgtctgtgtggcacagagagctgccggggctccctaaactgaggtggggcaggatgggtgcccacacccctatttattccccctggtgccctgagctcccagcacccccccagccttagtgggctcagcagggcccacatgcccccatctccaagcgtggggttgggggccccaagcccagcgagggagcctcagtccctggaggcagcttctgcctctcctgtcrcccctgcccaccaccccctgattgtttttctttgcggagaagaagctgtaaatgttttgtagcagccagcagctgtttcctgtggaaacctggggtgccggcctgtacagattctgtcctggggggctacacagtcctctygctttgtgttaatggggacttccccttacgccctgcgtgtacccctccccagtttaggggtctctggggcagtggccatgttctccccctgggggggctctgcacccccagtcctggggactccgtgcctggaaccctgcctcatctgttcctgccagaccctgagggtcacccttccaccctggtgtcactccccggctcagccaggccaggatggcggggtgggtcccttttgctgggctggactgtacatatgttaatagcgcaaacccgacgccacatttttataattgtgattaaactttattgtacaaaagtgtttggtcggtgtatttgggcaggagcgaggggttgggggtagagggcacggagggttgtgcaagttgaagagagggaaaagtgggtacctgaagtgtggggcaggtaaaggggccttcaggcaagagcccagacctgcagagacagtccgagactgtctcggaccccctgacaggctgcagcagccgcacccgcaccaggaataccccaccagtgcccgccagggtggtgccaaggtcaggcctccccttcctacaatcacagctgcagctggacctccggcctcctgggaagcccagcaggagggaaggcctgaggtcacactgtgggatgaggtcaccgctggctccacccacagccccagaccccttcagcccactctgcaagttcgagcttcatccccaccaagttctccgctggacccagatgccagtggagcacagagcggccgccagggggcgccttggggcaagagtggtgggggttgtggctgggcgggtctctgttcctggaatggggcaggagggagaaggaggagccagcggaaggacggtgtgcgggccggccagccctggacgaaagaagagggcccctccaggccagtctgggcaccctgggatagcggctgcaggtaggcagaggcgctgccagtgcccaggtggcctttccctccatccggcccttcccaccttcctataaccttccctccacctccctcaactcctggcctccccacccttttactgccttcaaatctctctccctaaaccctgaccccttcctgcaccccaagcccgcccctctctccgtaactcagccatcagcaggggcagacggcaggtggcctggttgctgcagctcccaggatcagctctgccctcccgccaaacgccagcctcgtcaccgctccagggcacctccagcagtaacaggtggttgcagcaggtggcagccagcccctggatgagccaaggtctcttccccagccaggcatggccgactctgcacaggcccagaagctggtgtacctggtcacagggggctgtggcttcctgggagagcacgtggtgcgaatgctgctgcagcgggagccccggctcggggagctgcgggtctttgaccaacacctgggtccctggctggaggagctgaagacaggttcttgttgggggagcttgtggtggagagggtgtggacgcttccccaacccttcccaagctgggatccccacccctgcagtggaacagatgatgctggtttctgtccacatggatgggtcgagtgagtcacattgggaacgtgactccagggtggaagatgaacccagcctctgssctctggccccagctctgacatggcctgtgtcctccaaccccggccagggcctgtgagggtgactgccatccagggggacgtgacccaggcccatgaggtggcagcagctgtggccggagcccatgtggtcatccacacggctgggctggtagacgtgtttggcagggccagtcccaagaccatccatgaggtcaacgtgcagggtgaggagctctggacactcctggccatcttgcctgtttgttccccactctgtctttggccttgacctccggtgactcccctgggacaagttgtcctattgacagccctgcccccgcctcccctgacctgtcatggttttccctggacctgggatggggaggaggaagatgcagagagggaagaagctgcagcttggatacgcctcctcctctgccaggtacccggaacgtgatcgaggcttgtgtgcagaccggaacacggttcctggtctacaccagcagcatggaagttgtggggcctaacaccaaaggtcaccccttctacaggtgagtggcaggccctcttgtcctctaagagcccatttccctcagcattgagtcttccttctcctcccaccaggggcaacgaagacaccccatacgaagcagtgcacaggcacccctatccttgcagcaaggccctggccgagtggctggtcctggaggccaacgggaggaaggtgagcccagaaaaaggaggcgcagagatggggctcctgccmtgcacacccccttaccctgccagcccaaggaggccggggccgagagcaagctgtcgggtcccaggtctcagcagtacctgcctttgccaccaggtccgtggggggctgcccctggtgacgtgtgcccttcgtcccacgggcatctacggtgaaggccaccagatcatgagggacttctaccgccagggcctgcgcctgggaggttggctcttccgggccatcccggcctctgtggagcatggccgggtctatgtgggtgaggactgggctaggcagggggaggctgagaatatggcaggaggacttgctctagaagggggcaggacccacatggccctgggagagaagtgtggactctggctagaaaaatatggtctatacatgggccaaggtagactgtgattatgtctccacagcctgcagagaatacaggatccatgcaagttgggacattaaaaagtgtatcataggctacagagaagattgcagctatgggagcagccattccccaggagaggagaggagagggacagtgtgtacacagcactaaaagggctgggttcagtggctcgcatctataatcccagcactttaggaggctgaggcgggaggatggcctgagcccaggagttggaggctgcagtgagctatgaccgcaccactgcactccagcctggatgacagagacagaccctgtctctaaaactttttttaaaggaagtagcatctacacagggaataaggtcacctgccactccatcctgcagtccccaagcctctcagggcccaccacgcaggtcctggtttctctatcctctccccaggttctttgcagatgcaggctggcccaggagagcaagtgactaccagggcgagggagaaggcagcctttcccaggctgctgtggggatgtgggcggcaactacctgggcccaaagagggggtggcccaggagagcagcctcgatgtggtgttgcaagggcactcaggggtgtgtccgcctctcttccgccaccggcaggcaatgttgcctggatgcacgtgctggcagcccgggagctggagcagcgggcarccctgatgggcggccaggtatacttctgctacgatggatcaccctacaggagctaygaggatttcaacatggagttcctgggcccctgcggactgcggctggtgggcgcccgcccattgctgccctactggctgctggtgttcctggctgccctcaatgccctgctgcagtggctgctgcrgccactggtgctctacgcacccctgctgaacccctacacgctggccgtggccaacaccaccttcaccgtcagcaccgacaaggctcagcgccatttcggctatgagccccygttctcgtgggaggatagccggacccgyaccattctctgggtacaggccgctacgggttcagcccagtgacggtggggctggggcctggaggcccagatacagcacatccacccaggtcccgagccctcacaccctggacgggaagggacagctgcattccagagcaggaggcagggctctggggccagaatggctgtccttgtcgtagagccctccacattttctttttcttttttgagacagggtcttgctctgtcacccagactggagtgcagtggtgtgatcatagctcactgcaccctcaacctcctgggttcaagcaatcctcctgcctcagcctcctgaacagctgggaccacaggtgcacgccaccacacctggcttttttttgttgtttttagagacagggtctcactatattgctcaggctggtcttgaactcctgggctcaagtgatcttcccacgtgggcctcccaaaacgctggaactacaagtgtgagccaccgcgcctggcccaagccctccacattttcaatccaggagccttgagtctgtgttgtgtcctgacacctccaagttctagggccgtcaggacacgggagggtttggggacagagtgtccttcctctgtcctctcatcccagtcctgatggccgcttggtgagtgtctggtgccctggtggcctgccccagctctcttctggctttctgagcaggaagcgagcagaggctccacaggsttacgctgctctcctgacagccacacgcgaccctcggtgcagagtgcagaggcggctctggttcctccagccacctcagtccctctttgggaggtgatgttcccattgtttttcaaaggcctcaccttcaactgtctgtcttagaattcccctctggagggctatggcctccctatgctttcacttcccacctctctacctaagttccttcccagcacatcgccagccctgggcctggggatgtccccaatgctgtacctggctgaccccggattaaaagcctcatccacgaccgtgtccatctgtctgtccagctctccctcccatccccccaccccatgtccgcctccccacggcgcccatcccacgtggggacagaaggaagtgagcacacggcacacccgctgttggattggttgctatttctcccgtcccacagggcctgacctggcccagggtggggtggggggctctggggacaggacatgcagggaggaaggggggggcaggattttcctgtgttttatccatttgcaagttggtcaccaatagaaatgggactctgagggctaacagaaatgggactctgagggctaacaggagagggcggcctggctctgggccccagccagrccccaggagtcctgtcccctctgagaaggggagggagagagctctagaaaccaacggagaaacagagaagggggyaggggctcatgtcagcaaacacggctacatcacgtgacacgccagtgacacagaaacacacgccaacgcacacggctgcacagcgggcaggggcggttaggggaaagggagccggggccacccatcttgtcctctgcagggcgggctggggggcagggtgaatgcatagaacacatcatgtgtacacgctcagggcgtggcaagagcgtgcgtcgacccacgggtacatgggatggacacgcatgtgcttcatgaggggtgggaacagggaggagggggaagaggagcactgagccctggccaggcccgggaccacccgcagggcacacgtggggcacatgtgggctcaatggttgcaggcgcctgggcaggtagcacacatttgtccaagaacatgcaaaagacaccagcctccagacaacatgccaggacgcacacagacagcagccaacaagcaggcacatcataggatgtggaggacgcatagaaagggcacagcagacccttagagatcccctggtccacctgaggcccagagatgggcagctgtgggcccaatgccactccaggtggggggagtggtgccccagccacgcttcaacccttctcctgtggccccaaggccgtgggacttccggaaacacctgggctgaatgggggtcctgtccaggcggccggaagaggggactgggggctggggcctgctctgatgtctcccaagcagcccgagatgggagcaggagggccgtggccagacttggggcagacttcctgtcctgcagaggggcgttctgggaagggacaggcaggcccccagctcaggacagcccacctggggttacgcacgtggccacactgacacacacacaggacaagggagagctcggctgtctgagctcgggtagaggtggaggggtactgtgttctgggaggtcacatctgtttggccacatgcacacacaatgcacacacaatgtacacacacatacaatgcacacacacgtacgcttcacatgacctgggaccctggggtccgcacacacacaccgagtgccttgcctgtgcacacataagccccatgccagggcatggcacatttgtgtacttgtgtgttcacctttcatgatcctagaccacggagtggggacctctaacactgtcctttctcccacgcaccacctacctgccaccaaacccacaaattgtgcctgtgctggctacacaacaggggaggtgctagccccttcctcacaccagaaatccaggcctgtgtacccctcagtcacaccctggtgtggggagcagcctgagggttcagcaggagaggtgtcggggatgggtctcaggacccagcccaccctgagtggccactgccacactggccactccagtacttctgaaatagacatttccccaaacccgagttccctgaggcagagcccagagcatccgatggggcagtgggggacacacagtcctctcccaggtctgaggtgggtgtgtgaggaaggggtcgtgtcctgatctttgatccctgcagggaagtccttggcatcttgcctcatcagtaacattcctacaagtagccctttccttccaggaggcattcgtgtgatccccgcacccatgccagcgtgcatggtttgtgcctggtatggcccctgcctggnnnnnnnnnnnnnnnnnnnnnnnnnnnnnnnnnnnnnnnnnnnnnnnnnnnnnnnnnnnnnnnnnnnnnnnnnnnnnnnnnnnnnnnnnnnnnnnnnnnnnnnnnnnnnnnnnnnnnnnnnnnnnnnnnnnnnnnnnnnnnnnnnnnnnnnnnnntgagggtaccagcttccaggggctcggggctatgctgggcagagacatggaggaagatgaggatctaggtgtgagcatgcagagccctgaggctgggcaggcagggagctctgcctgcacaatgatgtagccgtgtgtggccacaccagcactgggcagcacctctggggaggggggcagggcaaggacaactggagagacaaagccagatggggccacgtccttagaagtgtgtgtgcacgcacatgtgtgtgtgtgtgtgtgtaatacgcagggcagaaacacaccatgtaggtcaggcaggacagaaacacatcatgtaggccaggcgtggtggctcaggcctgtaatgccagcacttagggaggccaaagtgggcggatcacctgaggtcaggagttcgagaccagcctggccaacatgtcaaaacctcatctctactaaaattctaaaattagccaggcgtggtggcaggcgcctgtagtcccagctacttgggaggctgaggcatgagaatcgcttgcgtcagggaggcacaggttgcagtgagctgagattgcgccactgcactccagcctgggtgacagagcaagactccgtctcgaaaaaaacaaaaaacaaaaaacaaaaaaaaattaaaaagcacaccatgtagagagcccctaacacacacacacacgtgcatacacacgcacgccacacacacacagctgcattctaggtagcaagaaatacacatttctgtgccctcccaaaacaggtgtccagtccacagtgtggagggctctatctgagaagacctatcaatacttcaggcacatcctggacacacacacacacacacacacacacacatgcacaccctcctgggacatgccacagcccctggggtaacaaagacatggggtgtctgccatggcctgtgtgtacctgggcctccctggatcctctgagaatgtgagtgtgagtccacacacaccacctgcctggtttgtagcagacacaaagggctcaggtatcagtggctttgttgctgttgcattaggttcaaacactgaaacacaaaattccacgtacacaaatggtgtgtccacagatctgtggtctcacgcacgcacacacactgttcacagaggacagagagggcgtgatggactgctgtgttacacttggctgcagtctacacaacagccccggtgaagggggaagctcagaccacgcacacacacccaaggtgggggtggagggggtgctctggtgcatcacacacatcacacgcacacgcacgctggggtgtccacacgtctcgagcatgtgccggcggcatgcatgttggtgtgcatgtgtaatcacgcctgctgcgatctacgtgcggggacgggggggggtccatggcccggtgaggtccagggacaccagggtctgccgtgggggtggaggaggggtggggctgcctgggtctgttttgggagtgagcctggagcaggggatggagtgaaaggggtggtgggggtattgctcccgatgtggtgggggaagggtctgggagagagaagggtggggggggcctacaagcccagcgtccccccaatggatgacgccaagaccacccccagcaccacacagcaaatgatgatcatgattttcttctgcagcagaaagaggagtgagacaggcagacagtgagagagatcgacacacggacagatgcagggacagacagggcagagggtggcagggagaagaggggagagaaaacagaaacaggaagaggtcagagccagagataaggcctcccgcccgctgccatcactcacctcagcccgggctcagccttgggctcccccgcctacccccaggccgcctgccccgctcaccctccgggccttgctctgatatttcactgctttcttggtgtcagacacagctcgctccacgtagtccacagaatgttccacgttgtactcgatgcggtcaatcatctctccctgcagacagaggagacatgcacagggagggatgggggctgggctggaagaggggacctcaggcccagggaggctcccagagtggcatgggtggcagagccagtacctggctctctacgagcatggccatgtccacaaacatatcgtgcagctcgcggatgctggtctccagyttgatgatctcattgtgcctcgtctcaatctcattcagcgcctgcttcgtcatctgtgagtccattttgatctagggygacgagggagagagctacaatcacccttctccgccatgagcgcctccaccgcagtggagtggccagggtcaaatccggtgtcatttactagctgaaaccttaggcacattatttacctgctcttggcctcagtttccccacctagaaaatgtggatcataacactgcccacctcacagggtggttgtgaagactgagtgagttaatatgtacacattggtcaggcacgatggctcacacctgtaatcccagcactttgggaggtgtgtagatcacctgaggtcagaagtttgagaccagcctggccaacatggcgaaacctcgtctctactaaaaatataaaaattagcctggtgtggtggtgggcacctgtaatcatagctactcaggaggctgaggcaggagaattgcttgaacccgggggggcagaggttgcagtgagctgagatcacgccactgcactccagcctgggcaacaagagtgaaattccatctcaaaaaaaaaaaaagagtcagggctgggcacagtaggtagctcatgcctgtaatcccagaactttgggaggctgaagcgggcggatcacgaggtcagcagaccaagactatcctggctaatgcggtgaaactccgtctctactaaaaatacaaaaaattagccgggtgtggtggtgggcgcctgtagtttcagcaacttgggagtctgaggcaggagaatggcgtgaacccgggaggcggagcttgcagtgagccgagattgcgccactgcactccagcctgagccacagagcgagactccgtctcaaaaaaaaaaaaagagtcagtagggagaggcctgtaaccccagtactctgggaggccaaggcaggaggatcacttgagcccaggaatttgaggccagcctgggcaacatagtgagactttgtttctatcaaaaaaaaaaaaaaaaaaaaggaaattagctgggcatggtggcgcctgtggtcccagctactcaggaaactgaggcagaaggattgcctgaccccaggaggtcgaggctgcagtgagctatgattgcttcacttcactccaacatgggccacagagtgagaccatgctgaaaaaaaaaaaaaaagaaagccagtggggaagagaccgtgacccacagtcagatatgcctcctctccacaaacacccagcctcagccaggtgactcacttcccaaattactcactgttcttaccacattgagccactcctctgctctacagcctgccatggctccccactacccaaggctccacaccttcccttcagcagtcaaggcccagactccctctcccctcatctcctgctcatcctatgaccattctataagccgaaatcatacaatggctgtttggacagtgttcagtctccccgtctttttttttttttttggtttttgttctttgttgagacaagttcttgctctgtcacctaggctggagtgcagtggtgctatggtgctatcatagctcactgcggccttgacctcctgtactca

SEQ ID NO: 94458 - DNA, 28743 bp, Homo sapiens
tcttcagggctactagtaagctgatgaatagtttgaaacatctggaaacatctgcaacatgaatgaaaagttttaacataatctagtcatcaaagaaactcactaactgaatgaattaaattttaggctaatagtaaatatatatttatatttacaaagaactacagaatagatgtttcaaaaattacattgatctggaaagataatcaaatgatagaaaataaaacattactgatatttttaagtgggaaataatagtaccccttctccaacccacacctgacatggggaaattcaatatgcctatattttcaaatctaaagactatcacatgctgggtataatggctcatgcctgtaatcccagaactttaagaagccaaggcgagtggatagcttgaggccaggagtttgagaccagcctgggcaacatagggagacccccatctctaaaaaaattaaaaaaacattagccagtcatggtggcgtgcacctgtggtcccagctacttgggatgctaagataggaggactgcttgagccccagaggtcaaggcagcagtgatctgtggtcacgccactgcactccagtctaggcaacaaagtgagatcctgtctcaaaaaaagaaaagaaagaatatcccaatataacttcacaaacaacagaaatcactagaaatactgtcaacagtctaacagctggaaaaaaatgttgtatgttaagatatatgctccacaccacatgccaaccctatttctgtttaccaaaatctgaattcttacatactacttacaatctcaaaatactgatagagaaaaaaaggagtatgtccacaacctccccacacttactcttccaaagttcttttctttcccttgtcaatcacagtcatctgatcgtggattttaagatctggcttctgggctattaatttcttcatggtatgagaactaatggatccattcaagtgggcatgaagttcctaagagatacaaccagtaaaacttatcaaatatccaatagattcatagcatcttaccaagtacttaatgttggtagtttgcaataggcaaactgcttactagatttagctacataataaagtttacaaattttgcctacaaaatttactttttctttttttgagatggagtctccctctgtcacccaggctggagtacactggtgcgatctcagctcactgtaacctccgattcctgggttcaagcgattctcctgcctccgcctcctgagtagctgggactacaggcatgccaccaagcccagcgaatttttgtatttttagtagagatggggttttgccatgttggccagtctagtctcaaactcctgacctcaggtgaatccacccgccttggcctcccaaagcgccagaatttcaggcatgagccactgcgcccagccaaaatttactttgatgaaaagaagcaacatcaaagtcattataattagcaaccactcaagatttctgtagttgaattctcaccacttttggcaattcagaatagaagtctgtcttgcaaggctgttgctcttctgcctctatcattttagcaggaaaaaaatgattcttctccactcttattcttagtatgagcaatatgatgtatttcagtcagtaaattgtatggtactgaatttccttcagattgctttacttccacacattttggtaagattagctgtatgtgtagatctgggttcagcttcacctattttaacaaatgttaatattttcasatgtaaaagcaaagaaacaggattttgttaattttttctttaaaaggcaaaagctcctctaaaactaacttaagtgtgtctaaggtgggaaaacgattagtaaacaacataaactggaaacaggaaaagacctcaagcttataagaggtgtactaaaacctgacatttagtagagtatattccttaactattggcaccttctatacaacgacttcaaaaattcaaaattttataaggcctactttggataaaatatatatatatatatatatatatatatatatatatatatatatatataatttttttgagacagtctccctctgtcacccaggctggagtacactggcatggtctcagctcactgcagcctctatctcctgggttcaagtgattctcctgcctcagcttcccaagtagctgggattacaggtacatgccaccacacctggccaatttttgtatttttaatagagacagggtctcaccatgttggccaggctggtctcgaactcctgacctcaagtgatccacccgcctcagcctcccaaagtgctaggattacaggcatgagccaccatgcccggccaaaaataaaattttaaattttgaattgtttaaaatatataaaagaagaacagaggtgctggcattagatggacctaggtttgtccttttaccagctctacaggttagaagctgtgtggccttagtcactcaccttcatggcttcagtttctttatttacaaaaatgggattaaaaatgcaaagtagcagtgacgattaataaagtattttaaattcccctcatctatgttcccacatgagccagtcactgcctttaactcagcatttaatcacactgatatctcaatcactgatatacttgtctttctctctcaccagactgtaagttccttgaggacaggtcctttgaattattccaccactctaacacttagcacagtgcctagcacactgtaggtgataaatcaatcataatttcccttcacttctgaaagtggtttataagtgaagataaaattccaagtgaaatttagtgattttcaaactagccaccttgactctctgggttctcacgtattaatgaggatgatgtttaagaataacagtttccatgtatttggaacctaacaggtatgtgacaagcgcttttaataatgttatctttaatccttgaaataactttgtgaaatattactgtattgaaaatcaataaattgatactgagtggggttaaataagttaccaagatattaaaatgtacaataaagaaagtagtttgtataggactaaacatagccatagaaatccatagaaaggcctacttagtatgagataaacatggcatttcaaagtaatgccatagtaagtgcttaataaatagtaaaaaatgaaaaagatggactatttaatcaatggcatttaatatctctaccgaaaaacataaatgatttaattaaaatggaaaaacatacctttttttttttttcttttgagacaggatcttactttgttgcccaggctggagtgcagtgtcacgatcacagcttgctgcagtctcaagcttccagactcaagcgatcctcccacttcagcctcctaagcagcagagatcacaggcatgcaccacaatgcccatctaattttatataaaattttttttgtagagacggggtctcaccatgttgcccaggctggtctcaaactcctgggctcaagtgatccaccagcctgagctgggattacaggagcgagccactgcgcccggccagattttcaattttactccaggatcctgaccttaatttgtgccccattcaaaccatcctccagactgacctttaactagctgtgagtaaatttactgacccactggctacaatgttaacctatggaaattaaaaagcaactaagcaatcataatctttacacattaaaaaaaattgttgttccttgcctaaaacatggataccaacaacagcatgccatgacaaatttaacttttctggactggttttgctctgggacggaaggcaacaaacactgggataagatccacgttagtaatacttcatcaatattagagcagggccagaagcaagtatcctgtctcccagggaacttttttcatgctcccacctactcccccaaaagggaactcagaataaaaaaaaatttgttactgtttattatgcacttaccatgagccaggcactgtggtgtcttagatagttattttgtttaaatcctcacaacaacccctgagatattattatccccattttatataagaataaactgagatttaaacaatggcccctcctcccccggcctaaatcataaggcatcgaaatcagaaattttactccattctctttcttctttaattacttttcttgatctggtctttgcaaaacaagtagtatttttgacataacacctacattttaggaacctgtcattaaataaatttgtttctatggtgctacgtatttttcaaagtccttcaactttttttttttttctatttgcccctcaatcaaccctgagatacctcacgaagcagtacttaatctcattttagaggtgaggatccactgacccagcaggcataggtgagcccttcttctaatcccttcagaagcaattctcaaactgctcaaatgttccatcagatctgaatgccttacactaaactgacaactctgtcaccaactttacagagaaaacagaagccatcaggtgcaaattccttctttttctctctgccctacctcacacctgagcttatgattatccataatcttttttttaccccatcaggagtcacagataaaggattcattctcctatccccacaactaatacgtgcccaggatcccatttctatctattccaagttactctaccagtgagttgtcttctcatttttctgttccttcaacctctccctctccactagctggtttccctcacaggaccaacacgcatgtgcagtatttgcttccacctgaaaacaaaacaaaagactcttttatcccacaatattctttagccactgccctgacccttttttccttctgagttaagctcctcgaaagtataataatttagactggatacctcctttaactcacctcctattcactgaaacatggattctgcccttattgctccacagaaactgctctccctaaggccattaatgagcttttaaacaccaaatctaaatgtcacttttcaattaccgaatctttatcctgatccaaaccttttctttcttatttcattttgttccacaagaaaacattggaaaatacgaaactttttcttgactccagtatccaaatctgctggactccaaaactcacactcttaaccattatgcagtaccacctgtagttaaccataaagttatctgatttccttttctatttcagccagtcagtcaccaaatcccagtgaacaaatgataaatttcctaaatgtctctggaagtggtttcctatggatgactcccagacacccaatttagaaactttatgattattctgaagtctaacctggatttactccttaaaaacaaagctcagaacatatcacagggaacaatcacctctcttcagtgactcccctttctggggacatattcaacactactttaaaatccacagaattctccaaggcggtgtgatgagaaagagaggctgagtggtttattcaccgtcagtctaacatagggctgggaatacaagggaatcaacagtctactatctgtggggaaacgtcttcttgttaggtgtctataaattatttgtaaaggtcggtttcttcagtttgcaccctggccttagtgacttgttttcaagttttaaatggggttctcttttgcaactgtgagagcattaaataaatcagcaactattagcacccaaggaagctaactaatccttgcctactgaaggtccgtggtgccgacccttcttggctcctaccagacccttccttggcggtccaaggaagccaagtcgtcagtccccacagactcacctcttagagatttctcaactacaaggacttaggcaaggtttcccttttgactggaaggcttgtagaaacgtgacaacccgccttccctaacactcatgtcacagcggtagcggaccgtattctgggacaaatggaactcacgacattccaaagaaaggtcagccgcaagcraacttagcactggctacaccctcctcaattctggttggcgagatgcgctcttcccggaagtgacgcacaagtgccggcggaaggggaagtccaggagcatgggtggtttttttccccctaccgaggtccgtgaggkgtgtgctaaccaaggggcggctcacaaccgtgacagactgccattcctgagtctcttctggccatgggcccccggagccgtgagcgtcgggcaggcgcggtacagaacaccaacgacagcagcgccctcagcaagcgttccctggccgcgcgcgggtacgtgcaggacccctttgccgcgttgctggttccgggcgcggcgcgccgcgcaccgctcattcaccgaggctactacgtccgcgcacgcgccgtgaggcactgcgtgcgcgcttttttggagcagattggcgcgccccaggccgcgcttcgcgcgcagatcttgtctctcggcgctggcttcgactcgctctattttcgcttaaaaaccgcgggccgcctggcccgggctgcagtctgggaggtggattttccggacgtggcgcggcgcaaagcagaaaggattggagagacgccagagctgtgcgcgttaaccgggcctttcgagagkggggagcccgcgtccgcgctgtgctttgagagcgcagactactgcatcctgggtctggacttgcggcagctccagcgagtggaggaggccctgggcgccgcggggctcgacgcagcctcacccactctgctcctggccgaggcggtgctgacctacctcgagccggmgagtgccgcggccctcatcgcctgggcagcccagcgttttcctaatgcccttttcgtggtctatgagcagatgaggcctcaagacgcctttggccagttcatgctgcaacattttcggcagctaaactcccccctgcatggcctggagcgytttcctgacgtggaggcgcagcggcgccgcttccttcaagctggctggaccgcctgcggtgccgtggacatgaatgaattctatcactgctttcttcccgcagaagaacgccggcgggtggaaaatattgaaccctttgacgaatttgaggagtggcatctgaagtgcgcccattatttcattctggcagcttctaggggagacaccctctcccacaccctagtgtttccatcctcagaggcatttcctcgcgtaaatcctgcttcgccttcaggggtattccctgccagcgtagtcagtagcgagggccaggtcccaaacctgaagagatatggccacgcctctgtcttcttgagcccagacgttattctcagtgcaggaggatttggagagcaggaggggcggcactgccgagtgagccagtttcacttgctctcaagagattgtgactctgaatggaaaggcagccaaataggcagttgtgggactggagttcagtgggatggacgcctttatcacaccatgacaagactctcagagagtcgggttctggttctgggagggagactgtccccagtaagtccagccttgggggttctccagcttcatttttttaagagtgaggataataacactgaggacctgaaagtgacaataacaaaggctggccgaaaggatgattccactttgtgttgttggcggcattcaacaacagaagtgtcctgtcagaatcaggaatatttgtttgtgtatgggggtcgaagcgtggtggaacctgtactaagtgactggcatttcctccatgtagggacaatggcttgggtcaggatcccagtggagggagaagtacctgaagcccggcattctcacagtgcctgcacttggcaagggggagcccttattgctggaggtctcggggcttctgaggagccattgaactctgtgctctttctgagaccaatctcttgtggattcctctgggagtcagtagacatccagcctcccattaccccaaggtactcccacacagctcatgtgctcaatggaaagctgttactggttggagggatctggattcattcctcctcatttcctggagtgactgtgatcaatttgactacaggattgagctctgagtatcagattgacacaacatatgtgccatggccattaatgttacacaaccatactagtatccttcttcctgaagagcaacagctcctgctccttggaggtggtgggaactgcttttcctttggtacctacttcaacccccatacagtcacattagacctttcttccttaagtgctgggcagtaaggactggactaatattcaggacccactaaagtagacaataaagttttccacaaataggatgaccctctagctatagatactgccactcctcctttccccatcctttttttcccttagcactattcagtgcaaaaagtgaaaaaggttggtaaaataggtaaaatacctagaaacaatcactacrgaaaacagctgaagacagtggccatgcagtccgagaggagtagtggtctgcctctaattttctaatctaagttcgtttattgagttacagtggtctttagtaaagtaaaacaatttcccaatcccaggccttgtgatttgagatggtaccttagaaaaagttacacgcagttccgtggttgaatatatttgagatggtaccttagaaaaagtttcacgcagatccttggttgaatatagttgagggagcgtagtattgacaattcttcatgtaggaaacctgaaatgaacacagtcacagtttgattaaaacattgtcctgtttgttgcaacagaaaactcggatagttttaacaacaggaaacacttgkaggacttcctttaccaacatactttttaaatgttttgctattggttccatatttatttagatttataagtgtcaataaagcaaacttttgatgcctcaattcattttgcacggggtataataatgttttgttccagatatactctccacctttcactgttytgtgctccaagaggctgacctttatgggctgcatcaaggagctctctttactttttggttgagttccaccagtcagaggcaccagaggggaatgggggcaaaaagaagagtgagagtgagttggtatttattcccaattcttcccctgttggtttgcaagttggcagtggcagcattcttctgtcaaaggctacagctcctgccgtgtaatcctttcctgaagacagagttctaattctgcatcatcccaggtttcagtaattgttcctttacttcaccttttcaggcctaggagttgtgatggctctttgctagacctgaactgtactgtccaatgtggtagctattgacracatgtgactatttaaacgaattaataaattcagtggcttagtcacattgaccacattttaagtgcttaataactatgtgtggctttggctactgtattagacaatgtagatgtagaacatttcatcgttacagaaatttctactggacactgctgactggatatcttgacttggtttcccttaaccctactcagccccttatagttagcatcccattaaactcaattatcccttttaaatgggaatctgttgcctagtgagccatgtgagatcaatgaaatagctattcatccttaaaatttgagccttaatttgtcatctaaattatgcataccttgtgaaatatacacctcaaaaaatgtagtggctttggtggtaataagtgtattactttagtatttcttcttagtcctagaaacyttagtagttttcattctacaagtgcctaaatgattattatgaaccatcattgatgacaaattgcatcctttatttctattaattttgcatataaatggatgtgaaaggtgattaatataaaaaccaagtagcaaacacaaacctaagtgtatggagaggacagtcttggctctgttagatgaagcctccccgggggagaccagctgaatgagggttgtggtataggctgggcatggtggctcacgcctataattccagcactttgggaggccaagrcagaaggatcacttaaagccaggagtttaagaccagcccaggcaacaaagtcagatccccatctctacaaaaaaataagtaggcacggtggtgtgtgcttgtagtcttggatactctggaggctgaggygatagtgagctgtgattgtgccactgcactcctgcctggttgacagagtgagaccccgtctcttaaaaagaaaaaaaaaaaaggttgttgtccaacttcagctttcctgagactttgtaagagccatttctagggaaagcattggttatggctatgactgagtcctgggaaacagggcttattacagctgggaagacatctggcaaggcgatcagtgggccaggtagtagaaaactggcagggaatatgatcagcaggagaaaatggctgttctgtatttcctgtttctaagtttactacagcacaccccagctttcaggagcagataaaagcagaacactgtgatgaggccaggcgcagtggcacatgccttgatcccagcactttgggaggccaaggctggcagatcacttgaactcaggagttggagaccagcctggccaatatggtgaaactccgtctctacccaaaaaaaaaaaaaaaaaaaaaaaaaaaaaaaaattatccatctatctatatatacaaagattagccagggatggtggcgcatgcctgtagtcccagctactcaggtactgaggtgggaggattacttgagcctggcaggtcgagccaagatcatgcaactgctctccagcttgggtgacagagtgagaccctgtctctagtaataacaacactgtaatgaaatgagtgttctcagctatgtagtagagtgtaccagaattcaaacctagatctaactccaaagcccaggttacaccttccactatgatgctgcttacatcatgccatcagccattatttcattacttttggggggaaaagaagggaggagggaggtcatctagagaatgtggacgtgtgccagacctaaattaggagtgcaatagtgcctattctcttgagcactgtccattagggcgccttatgagtaacagggcttgttctcccgagagaaattacccacatttcctataagtgattaccagattaagcatgccctccacctctaactgagcatcatgctcagttaaggaattattcatctctcgagctctactcattagagcacttagaagtattgtcagcaatatttaccctgtgcctttggagcagcattcaatatagactagcgttgaaccacagtttcattaacagtaatctgcacagttggaggtgtgagccagattgagaaccaaagctggataataattcttgcttctccatttcacttttgragtttttgttctaaaattctgatacggagctctggagtagttatgagagttaatgaacaggtctcttcctcttttagggattacttctagaccagataaactacttaaggaaggaaagtaatttcttattttgaatctccactctgggtcagggtttcaaaaatagtgtatcataatagtgaagatgaaaacaggttaagaacaactgttggaggatatgctcttcaaggccagtgctgttgcttctttttgtactttctgagttttaaaactgagtgcccgtttttcatctttctggagctttaagtcttcttaatgatctttgggagatggtatgtatccaatatgttccaggacccaggtgtttccttggtctttttcagtgatctcagaccttgaagtcctagcttattccatatgtattttgtgatcacaaacccaacctcaagcagcccatgcttaccctgggacttatcccacatgtcatctcctggaaaacagccctatatgactgccccaaatggaaccaaccgctttctccctgtgcaagagaagcctttgaagagaagctctttgaagagtttggtgaataaaagaactagttaataaggtgaggttttttgggtttgtttgtttgtttgtttgtttgtttgctttttgttttttgttttgagacggagtcttgctctgttgcccaggctagagtgcagtggctcgatctcggctcactgcaacctccacctcctgggttcaagtgattctcctgcctcggcttccggagtagctggaattacaggtgcgcaccaccatgcccggctaattttttttttatttatttttagtagagatggggtttcaccatgttggtcaggctggtatccaactcctgacctcaagtgatctgcccgcctcggcctcccaaagtgctgagattacaggcgtgagccaccatgcctggcctaggtgggtttttaaccatagggacagtccaataatgtctagtttgactttaagattaagccttttaacttcagtaatgaaggaaggggtgtaaaatagcattaagccggcaagttaggtcatgtaacttggctaatcacattagacttgatgtttaaagagagaaggagagtgtgtagagcaggaattatgaaatttataatcagctttagagtaggctgagatttccttggatgtcaataattatgagtaaacaagaattctgtcatcccacatgtaagtaagcagttacaagactgcttacttatctgtcttggacattgatagaaagcacatgattgggaaggggcagttccttgactgagggaaggaattgtgtctggttcacttttctatcaccaacatagtagatgctcaacaaatacttgttggatagaggtccactcttgtactcaaataaattatatttgaatattactatagttcttatgcacaaactgatgtcaataactcctgtaattgttgtgtatgtgtgtgtgtcagggggaggtaagcattaaaattttaaagaacccacagtttaagagtctttggaaatacattcaacttttctgacccaggtaaaggtggtagactttctggtgtcatttctatctttatggaataaacctgaaccttctccctgattgcaactttcagctgattctcatcctcttttgctcaacaattactgtattctttggagattaaatgagttaactttgcaaaaggctaatctgggggagtgggaacatgcaattaaatgtacttgtgagcacatatacacaggatcttcctaggatgttgtgatggttcactgggcatgactttgtgtgtaactctcaaaggaagtttaatagaggaagaggaaagaccttgccctaatttttatgtgaaaagtcatttgccacctaattgtcagactaaagataggaaataaattgaaataataatggcttttaggatattacatggcattctgcttttctcattccccagcctttgtccacatttttaggctttccattagagccccaacctctgattcatatttagacatattgcttcagaagaagttagcaaagctgatctttcttgtttatggatccatcagcaacttaaccaatatttaaggaaaataaatgttgccattccctttcctccccgctaaaaaacccttagttaaaaaagtagagtctaggccccaatccattgaatttacatttgaacagttgagtccagtcagcaataattttttttttttgagatggagtctcactttgtcaccaggctggagtgcagtggcacaatctcagctcactgcaacctcagcccccaggttcaagagattctcctgcctcagcctcctgagtagctgggactataggcgcatgccatcacgcccagctaatttttgtatttttagtagagacggggtttcaccatgttggccaggatggtctcgatctcttgacctcgtgatctgcctgcctcagcctcccaaagtgctggtattacaggcgtgagccaccacacccagcctagtcaacaatatttttatgttcagtgcataacatatttatcacatgaatgtacggatgactgatttaagctcaaatcagtaataaatgagtagtaaattgtaatgttgaaatcagagattaccaccagaaaatcaaaatatagtttaatgtcataattaaaaatagtttggtattgatgtcacaataaataaatcaaaggaataaagaattaaaaacagactgtgkgataaggtgacatttcaaatcaatgaggaaaggctggattatttagtatatggtctgggctgatctgtatttatgaaaatgatgttagcaccctatttctgacaagtcacaagcataaattccaaagggattaaagaccagacacaaatttttaaatagcacacacacaacctaaattggatgagcattagaacaagtataaaagaatatgattacaacgttggtggtaggaaagtccttaaagaatgcagaaatacaaacaaaatgaatagagaaaaaaaacgataactttatacaggtatttaaaacttctggacagcaagaaaatacattaaaatgttaaaatattagtggtcaactaatattttagtttgtaattcctctcttccttagatgaatagctcacaaggtatcccttccttctccagagtcatcatgccctrtggagattttggtttttctttttcaatcagtacctgaattaagatgcacagaactaatccctcagtttctcaatattagcttctgagatacattaagaatgggaaatttgagtaatggaagatggagctttcaatcgaagatattcattcattcatccattcagcatttgatggttctaagcagatacatcagcaaaccaaataatccattgtggaatttacaacctagcagaaggagatgagagattaaactatcaggatgataaatacagtgcataataaatacagtatgtaagtaagaaggacttggaaaaaagtaaagtaggataaggaggatmaggagtgcatgggggtgcaggtagtggtttacaatactaactaggtagggcagatagagtctctctcacggagaggtgaaacttcagcaaagatttgaggatgcaaaagaattagctaagtagattactgggraaataatatttcagacagaggaaatagccagagcaaagctcctaatgctactcattaagaactttggcttttcatctggtgaaaaggggagttgtgcagggctctggattatatcgtttgacttactttttttttttttttaatagactttatcttttaaagcagtttaaggttcacagcaaaactgagagaaaggcacagagatctcccatataaagcctgcctccacccacggatagtttcccccayatcaacacccctacctacctgatgaacctacaccgacacatcattaccaccacagtttacattagggttcgctcttggagtggtacatttgatgggtttggacaagtgtataatgacatgcatctgcatgtattatagtatcatacagaatagttttgctatcctaaaaatcctctgtgctccacctattcrtctccccccgccagatgcctggcattcactaatttttttttttttttttactgtcttcataattttgacttttccagaatgtgatatggttgaaatcatacagcctttttagactggcttctttcactttgacttacattttttatttttatttttatttttttgagacagagttttcctcctgttgcccaggctggaatgcaatggcgcgatctcggctcactgcatcctctgcctcccaggttcaagcgattctccggcctcagcctccctagtagccaggattacagtcacctgccaccacgcctgactaatttttttgtattttttagtacagacggggtttctccatattggccaggatggtctcgatctcctgatctcgtgatcggcccaccttggcttcctaaaatgctgggattataggcgtgagccaccgcgccyggcccacactttgacttacatttttaaacgattcctctagtgaggagatttggttgtaggagttcaagagtctaagcagggagacttgttggaaggttttgcagtaatcaaaatgagagatgatgtgaattcagctggagattgtgagaaatgataagatttggaggctattctgaaggtagacccaacagaatttcctaatggactggatatggagtatgatagagaagagtgaaggatgggatccaagacttgaggcctcagtaactggaaggttggagtcgccatcacctgagatgggggaggctccctgtggcacagagttttagggggagtttaggattcaggttggatatgctgatgttgggatgtctgttagatatccgaatgaagatctactgactcaaatatttattttataaccttcttcctcatcctctacattcacccacttttttctttttcttcttctgcaaatatccagacccaatacaggaatgggactagcaaataaaaatggttaaattggaaatgcaaattgtagctgaggaataggagcaaataccctgtgagatggcccaagcctggctggtcctggcttccaaagctgctttcattcagactcattgttttgttttctctttttcatgacttttctttctttctatgttaatatttattacactgtgtaattctttattagcagtgttttcagaaagctagaatcagataatcctcatctcacaagcctatcccctgaaacagttcctcatgccacctccccttacttggcatcctagttgctggtactatacccagttcccaaagtacatgatgctgtttcatgcctccattcctttactcacaatgttcttcctgtctggactcttaatattgtttctcctatcccatttccaagccatcccaaccttgttcacacaattcttatttgattttcaaaccttagctttgaggcctggaaacagtggcttgtgcctataattctagcactttgggagcacaaggagggaggttcccttgagctcaggagtttgagaccagcctgggtaacatagggagacccctgtctcaacaaagaataaaaaaatttagccatgcgctgtggtgcctgcctgtagtcccagctacttgctcaaggaggatcccttgagcctgggagatcaaggctacagtgagctgtgatggctccactgcactccagcctgagcaacagagcgagaccctgtctcaaaaataaaaataaaaagcaaagtttccctttggaaagcatttcctgattcgaaccctgcccactttcaggctgggataggttgcccttcttttgtattgccatagcaccttataaatatcatccatactgcatttatcatattttgtttaatctgtgtttcagtccgtcttctcacttcagactgaagttccttgttagcaggaatagtatcttatttatctttgtactcctagtacccagcactctataaacacttaagtgaacaagagtctctccttatgggtgtttaacttcttaaagccaggcatttctcatgccctttcaatgtaacaaatcctgtaccactggcttcctggggaaggatagggaaggatagggtagcaccagagagcaataatacagtgacatccaaaaaaaatcacaagcttttgtcatgcaaacctgtgcccttggtcacaaactcagagaatcagccagcacctttagaacagagctgtgattatacacaactgctttctggaaccccattctcagccctgctgcttccttcatctcccactgagacatcttgtgggtagtgatgggggtaagaagccatacagacagcgagtttttattgttttagtagaagactggtatagaaattgcattttaactactaagattcactccattatgacttcaaccagcatcctactttctagcctagattttttcagttttggtaagacatccctgtggccactgttggtttcagctgaacacctagactcacaccagtgttaatttaactatacagattcagctagaacacatagcagctcagggtttctgcatcctgctatgtgttcgcctacagttaagttaaaaacacttgttgctatttattgtgtaagtcctrtgatcatgtcctctttgaagatgaggaaactgaggcttagaggagggatataacttgttcctagacacagacaaagcaagacaggattcaaactcaggattgagaatcctgtagtaatttaagtgtcaagatagcttggaggcttggaccaaatctggacacactaaactaatcttcctggcaagaaacaccaccaccacatcttttttttttttttttttttccgctggagtttcactcttgtcgcccaggctggagtgcaatggcgccatctcagctcactgcaacctctgcctcccgggttcaagtgattctcctgcctcagcctcctgagtagctgggattatgggtgcccgacaccacgcctggctaatttttgtatttttagtagagatggggtttcaccatgttggccaggctggtctcaaactcctgacctcaggtgatccacctgtcttggcctcccaaagtgctgggattacaggggtgagccaccacacccggccaccaccacatcttatagacctaactggaagagtcaagatggcacttgaaggaagtacctctgagaatgtgctgctggtcagactggccgtaccggcagcgttgactctgcccctgaaatggcaaaactccyttctccacattgccaacccagcaacccgagaacaatttctgttgactttgagaacgaagccttacataaccctttgctgcctctacttcttttacaggcccatgatttcatgccacactgaaatcaaataatcaaggcattggtttctgtcacagcagttaaacacaaaccattaaggggaaccattgtccttttgtccagaacaaccaaccaagcgtgaaactatgaaagaaatgtttgctatttcctggggctggcgtagtacaggcagccaccccaggtgcccagtccatagctcaacttgaaaactaactgggttgattttctgtagagatgggatctcactttgttgcccaggctggtcttgaactcctggggtcaagtgatcctcctgcgttggcctcccaaagtgctgggattacaggtgtgagccaccatgcctggctagaggacacattttagagcccgaatccaccatgggatgacttgagagaagtctgggtactaactgctggagattaaattaatctgaaagtcattctgtcatctagaaactttgctactgttctaccaactgatttacaaaccagactccctttagcatttcatttcatattcataatctyttttgctataggtcaaaagttaagagtgagcactaacttttagatcctgggataaccacccacatggaagaaatgacatctgtcctgacattagaccctgctgggaggcatctttttttttttttttttttttgagacagggtctcactgtgttgcccaggctggagtgcagtgatgcggtcattgctcactgcagcctccaattcctggcctcaagggatccttctgcccagcctcctgagtagctgggactataggcacatgccaccatgcctggcctgggaggcattttctttaccccttctggaaaccacaggaacatgtcattttcagggggactgaatgaatctctggcttattgttgagtggaaatagctgctattttgaaccttggaaacttgcttaatggttacactcagcacctcacctacctcagccttgaaatgttgccgaaaccacaggataatctgggacacctcgtctccttcttaaacactgtccagatgttttatctcaggatgttgtgtttacaaggaaatggggcttcccattcccctccctctgatgaacatcctgactttctgccttcacaggagctttatttcactgattcatttgtagttatttatgggatcataaacggtgggtcaggggraaagatagaggctcaagagaaggagaccaggatgtaaaagcagtgaagctcttccctgactccaagccaacacctatcaggagctgaaaccatctgtcattcagaacttctggtgaaagtgttgaaacaatggcttagccatgtagccatccttaaatcccagtctggccccttgcctaggtgcagggtttcatcaaccacaccccactttaatgatttttccccaaagtctattccaaccaatgagaatgcaagccagaataatcattaacaataccacagactgacgcagaatgatctcaacctggtgtcctgtcagattctgaataaactttccatcacccatcctgattactcttcctttggcttaaaacttgtgcagggagttgctcaggctcattacgtatgtgagctgaaccttcccgaaacaacagacacaggtggagtcctagggcctgtgtcaggaatttggaagccacagaaccatgggatgtaaaccagggaaggacacttcctaactttctgtcttgcaagagatcagagagggctttgggccatggccaaagcctagacacagagactctgtgtgcagtatactcagccagagaatgttcagtgaccagagagatcagagtgatgcactccttccagagaaataatacaagcctttttaataggagtggaaaaggcaagacacttcatggcagtcacctagggtatagaaagaaaatgtattttatttttatttatttttatttattttttagagagagggtctcactctgtcacccaggctggagtggagtggtgtgatctcagctcactgcaacytctaactcccaggctcaagcaatcctcctayctcagactcccaagtagctgggactacaggcrtatgtaaccctgcccagctaatattttgattttctgtagagatgggatcttactttgttgcccaggctggttttgaattcctggggtcaagtgatcccccrgcctcggcctcctaaagtgctgggattacaggtgtgagccaccaagccttgctagagaacacattttagagcctggatccaccatgggtgacctgagcgaagtcacacaatctccctgggacaatgttttcttatctaaacaatgagtttgataatattacctacctcagaaagtgcttgtgagggtcacatgaagcatgtgtcttgcatggtgcttggcatgcagggcacacacaaaacaaatgttgctgtccacctctcactctgctttctgaagctgacattaatcccagatcacctgggaactaccatcctcagacctgggcaagtaaggcccacacctcagagggcctgcactttggagtgccttcctcaaagttttctaaacccctctccaggaggactggcagtgctgtccagcctggacttggtcccacatgggcctcaatccctttttcacctctccagggcactctgactctcaacaccccttccctgttccctcatgtggggttgatcagattccctgagaaactctaggactcacgttgatggggttgtccctgggccccatggtcaggaccaggttccaggaggggcagcctgggaagcagatcactcccactcggcaacatgctgtttcttcttgagggatcttgcaagattgagcaccagaatggtgctgacatgctgactttgggtggcttaaawttttatttagacaggagccccggaaaaatatttttttgcagagaccctgcaaagtctaagggtgactctgcctctggaacttggagacacctgtcttcacaggtggttatgtgggctttactagcatagtaattcttgatataccagctgtcaacattaggaaatgtttccgcttttaaaatggcaacaatttaaaacattgtctttaagctaaaattccagtgttgtccccattttccttccctgtccatcaggcttttgcctccctcacattatcaccaaatagaaacatacaatatgtgcccttttgtatctggattatttcatagcgtaatgtttccaggttcacccatgttgtagtgtgtattagtactccattccttctcatggctgaataaaaggacactgtcagctctatctctatctgtctctcaaatctagccccttctctctgctgccttagtccagatctccagatctccacctggactactgcagyggccttatggcttccagattctcccacaccattctatttcccacactgaccaggaaggaggaaaagcccacataaaaaatatgttatgactcatggcagcactagtcgcagcagccaaaaggtggaaacaacccaactgtctatcagtggatgaayagataaacacgatgtgttatatccacaggggaatactattcagccataaaaaggaatggagtaggccaggcctggtggctcacgcctgtaatatcagcagtttgggaggctgaggcaggcagatcacctgaggtcaggatttcaagcccagcctggccaacatggtgaaaccccgtctctactaaaaatacaaaaattagctgggtgtgctggcatgcacctgtaatcccagctgctcaggaagctgaggcaggaaaattgcttgaacctgggaggcagaggttgcagtgagcggagattgggccactgcactccagcctgggcaacagagcaagagtctgtctcaaaaaaaaaaaaaaaaaagaatgaagtattgatacaacatggatgacctcaaaaacattatgctaagtgaaagaatccagacacaaaatgatacatatcgaatgtttccatttatatataatattcagattaggcaaattcatagatacagaaaacagattagtggttcccagtggctgggagagggaggaatgcggagtgacagctgaatggatatagggtttctttttaggatgacggaaatgttctgaactagatagtggtgatagttgtacaacactgtgaatgtaccagatgctattgacatgtacgtgtaaacttgtgaaaatggtaaattttacattctgtgttagcacaatagaaaaaaaaatgtgttgccaaggtggtcactgctatggttacccaaggctcagtccagctaggagccaggtaaaatgtacctcagaattatccactctgagggctgccagagggagcatttacttatcagatcctggtcccccatggtcaaggattgccccatggggtattaacttccttccctttctagatttgcacatgtgtgagtgcccagcaggtcagagaagctctggggcagagcatgagcgagtcctgatggagttgagacacagggctatcagctcgcacttcaggaaggtgtgtgttaaatcactttagctgccacggaaataagtggagtaaaaggtgggccaaggggatgtgagatggggcgccacatgtgtccaaaacacgctaagtttgaaatcctacagatgcagactcatagaatttgaaaataagtggagaggagagagaaacaggaaagaagtttggtggattcgtgtcactccctgatcttcagttgagcttcacggagtcattgtctcatctcctcacagcctaacttcttcctcttcaccatctccaattgcacaagcttgctcacccaaattcttccacagatatttttcttccaccgcatcagtatgtgcttctttctctccatctaccagcatcctcctgtcctccctttttccaaatccagttcagaatccatggtccataatttcagttactttcccatgacagttctagactccggcccattggcatttttatactattcatctgagaaaaccccagcccctagggaaatcagctcccaggtttctccatagtcatattctgagatgagccccactaaagaacaaaaagcacaggacagggcagatcactgtagcagagattaccagctctgtatttcaatattatatccttaataataggactcatgtctagttggacacactgctaccagggatgaaagattgcatttcccagctgtccttgtctgcagatgtggtcatgtgactaagtcctagcaagtgaggaagaacgttaagggctgctgctggaaaggttaaagatagagtcaactcagccgggcatggtggctcacacctataattccagctgaggtgggcggatcacctgaggccaggcgttcaagaccagcctggccaacatggtgaaaccctgactctactaaaaacacaaaaattggctgagtgtggtggcaggaacctgtaatcccagctacctgggaggctgaggcaggaaaaccgcttgaaccagggaggctgatgttgcagttagccaagatcgtgccattgcactccagccaaggtgacaagagcaaaactccatctcaaaaaaaaaataaaaaataaaaaagaaagatagagtcaactcagcagaagacccccacttttctaccttctgatgcagctcctgttaccatcttgagccatgacctaaccttgaggatggaagccatgagccaagatgctgaaacaaaaaagtagtagatttaatgtaatcatatgccagccttaactccataattcctttctgtgaaagagaaataaactgatctaatttaagccacttttagtttgtttttattttctgttacatgtagccaaactctatcctacaaaataagcataatcaccaatcttggcaaggctagaaatattgcctagcttttcctggccaattcattctcatattctcctctgtgactataccaaaacttcatcagtctcaaatatttgactttccattcccatcccatagtcaacagatgacctggtcttctgcttcactggtaaaatagaagttatcagattagaaatctctcaagttcctgccacaaactttcctgccttccttcacccacgtactgcctctcctctattgccatagagatcttatccctcctccatgggagtcaaatctctccacttgtgatttgggtcccatacctccccatcttttcaaaagccctattctctcaattattcctgaggccatagagctagatgtttgtgtgctgacctggcccataggcatgttttatttggcccacacaggtttttaaaatttttatttttcttttacttaaggaataatttgcatacaggtaaaatccactaaaaatagtgcataattctgctggtattgacaaacatgtacctttgtgtatataccaccatcacaatcaagaagagttgcaagtccaggtgctgtggctcatgtctgtaatcccagcactttgggaggctgaggcgggaggttcacttgaggtcaggagtttcagaccagcctggccaacatactgagatcctgtctctacagaaaaaaaaaaaaaattagccaggtgtgatggtgtgcacttgttgtctcagttactcaggaggctgaggtgggagggttccttgagctcagaagtttgaggtttgcagtgagccatgatcttgccactgcactccagcctgggtgacagagagaaagagactttctcttaaaaaggaatagatacaggcttctcaaaatcaaccacatattttaaactcaacccataatctgactccccactccccaaaactcctattttagtgcttcctatttgagagaaaagcatcacccagagcatggagccaggaaccttaggactcatgatatcaacttctccctcactctgtctatccaattaatcaccacagcctgttgatttcaccttctgtttctccagaatcctccactgagaacatctcgaatgccgctgccctggtccaggtctccatcatttctcacctggattactgcaggaatctctcaatgagtctctccccatccaccttgcctccctccccagcccttctacatactaaagtctgaatgatcttttaaaacacagatatgacatttcacaaccctaccttaacatccctaatggcttccattacccttaggggaaaaaccccaaaatgaaaccttgggcatgtcttcatctcatactatgctcccctttgcacaaggcactttggtcccctgaccttctctcagaagtgttaagggaaccatgctcgtttctctccccattggagaattagtacagatttccctctgcaaaggaagctccttgtcacccagcatcatccccttcttagaatttccaggcatctttcaaaacaaagtcaaaaatcattgcttaccatccctccctagactaacctggccccctggagatgtggcttcagaacattctgtccttgctgagttggagcttcataattaattgtgaggtgtcttcctccgttggtggaatgtaaactctacgagtgcaggaatcatgtctgttatttactgctgcactcgagcaacctagctgagtgccacactcattaacactcaaccaaaatgtttgttgaatgaatacatgaaagactgtctttgtctttaaactcctaggagcacattctgaaagaagtcactccagaaaccccctgggttgcagaattaccctctgggaaacagtagcccccagacacttgttacttgagttgccaaggggcttggggacaaccactcttcactaataagcatgtgtcttccctggggctgttaatggaaatgacttctgtcgctaaataaactttagaatgcacagtgctgaccctgtgataagcagtgaggtcccacatcagcctctgtcattagcatgaggaccaatttgaagttgccgctttctgggcccactgcatctcataagatgtatctcttttagcccaaagccccacagcttctcattgtacctgtgcctctgctgctccagaggacagctatctctttgagatattctccaaaggaattctccaagaaagaattccacagggtaggatagggtatcccacgtaaaccacatttctcataatgtcatcctaaacatacctttctaatttgataaaaatctgtttaattctatctgcagagcctggaacaatgcctggcacatgacaggtactaactaaatctttgtgcaatgaataaatgaaatgcatgcagactatgggagcatttatcaaggatgtcttccaggagaaagggacgtgtcagccagagccctgaagaaagaggagtagttagctaggaaaacaaagcaggggagaacatcttaaggagaggcacatgagaaggatttggactgggagaaaacaggtgtgcccaagaaactagaagaactcagaggaaaccccaaattcctaaccatcatttacaaagctggtggcatctggcccttcccttcttctctgcttctccctcctctcattcctccgacaccaacctcattccactcatactgctgcccttttcctctttcagatcaacccccacttcctgcctcagggcctttgaatttactttttcctttcctccattttcaaaagattattttttcttgtcacttagcctcagatcaatatcaccaccccagggagacctttctcgaccacccaatctaaagcagcatcttgccaccccaagtattctctctctcatccccttgctggcttctttcttctttaaagcagttatctccatctgagcatatcttgtctatttatccattttcttgttcattgattgtctcccactactaaaatgtgagttccacgagggcagacatcccaccagttttgtttactactgtaccctcagcacctgacacagaggcttagcagatatacattgaatgaatgaatggctgtggcagggagagaataaggaaaaggaaagcaggggccagatcatgcagagctttgggggtcacactgtaccttctggatcttattttaaggagaataagaagacatggaagagtttaagcaggtgacttatctgacaatctttgcttttttaaaagatcattctggctgttgtgtggtgtatgaatcatatgggaccaaaatgcagcaatgtgaggcacagaccaggtgaggtgatggtggcctggccagctggagggtgggacagagatggaaagaaggagagggaatcagattacgtgcagcctgaagaactaacaaagtttggttataacataattggtaggttaaacacatctaaagaaagaatgagatcatgtttggccagacaagctcggggggttgttgttagcagaattaggcattaacctctaccccaggttttgggtacagaagctgggcagaactcttccattactcttcctccatcatattcaaggggcagaaatgtcctagaaaaaaaaagggattgggggatcaatcatgactactcttctttgatatactttatttagttattaaaagaagtttgggctgggcgccgtggctcacgcctgtaatcccagcactttgggaggccgaggtgggtggattatgaggtcaggagattgagatcatcctggctaacaaggtgaaaccctgtctctactacaaatacaaaaaaattagccgggtgtggtggcaggcgcctgtagtcccagctactcggaaggctgaggcaggagaatggcgtgaacctgggaggcggagcttcctgggcgacagagtgagactccctctccaaaaaaaaaaaaaaagaagtttgatgacctgggatggtccaaactg

SEQ ID NO: 94459 - DNA, 13591 bp, Homo sapiens
ttttctctgcctaaaatactcctccttcagatatttgcaagctgaatttctgtccttcatttgtctcttctcaaatatcagcttctcaatgagacgtgagagctctgacatccccatctctcttactcacaccataatacaatttaacccatgatttaatttactaattcattgtttttattgtccatcattctctaccaaaatgcaaactctttaagagcaaggatttttggttactgagtatttttgaatttgtatcaataaaatcaaaaatgtcggttgttacatttcctattgatatggtttggttgtgttcccactaaaatatcaacttgaattgtatctcccagaattcccacatgttgtgggagagatccaggggaggtaattgaatcgtgggggcccgtctttcccatgctattctcatgatagtggataagtctcatgagatttgatgggcttatcagggctttctacttttgcttcttcctaatttttctcttaccactgccatgtaagaagtgcctttcacctcccaccataattctgaggccttcccagccttgtggaactgtaagtcaaattaaacctctttttgtactaagtttcaggtatgtctttatcagcagcatgaaaatgaactaatacagtaaattggcaccagtagagtggagcattgctaaaaagatacctaaaaatgtggaagtgactttgtaacagggtaacaggcagaggttggactagtttggagggctcaaaagaagacaggaaaatgtgagacagtttggaactttctggagacttgaatggctttgcccaaaatgttgatagtgatatggacaataaggtccaggctgaggtggccgtaaatggatatgatgaactttttgggaaatggagtaaaggtgactcttgttatgttttaccaaaagactggtggcattttgcccctgccctagatatttgtggaactttggacttgagaaagatgatttagggtatctggcagaagaaatttctaaaatgcaaagcattcaagaggtaacttgggtgctggtaaaggctttcagttttataagggaagcagagtataaaagtctggaaaatttgcagcctgatgatgctattttctgaggagaaattgaagccagctgtggaaattggcataagtagcaagaagcctaatgttaatccccaagaccctaggtaaaatgtcattaggccatgtcagagaccttcatggcagcccctctcatcacagatctagaggctcaagaagaaaaaatggttttgtggtccaggcccagggtcccatgctatttgcagcctagggacttgatgctctgtgtcccagccgctccagccacagctgaaatatgccaatatacagctcaggccatggcttcagagggtggaacccccaatccttggcagcttccacatggtgttgagcttgaggatgcacagaagtcaataattgaggtttgggaacctctgcctagatttcagaagatgtagggaaacgcctggatgyccgggcaagttttttgcaggggtggtgccctcataggaaacctctactagggcagtgcagaagggaaatacggggtcagagcccccacacagagtccctactggggcactgcctagtggatctctgagaagaggaccactgtcctccagactccagaatagtagctgggagggaggctgtaccctgcaaagccacagggacagagctgcccaagaccacggaaacccaccttttgcatcagcatgacctagatgtgagacctggagtcaaatgagattattttggagctttaatatttgactgccctgctggattttggacttgcataggccctgtaaccccttggttttggcctatttctcccatttggaatggctgtatttacccaatacctgtacccccattgtatctaggaagtaactagcttgctcttgcttttacaggctcataggcagaagggacttgccttgtatcagatgagaatttggactgtggacttttgggttaatgctgaaataagactttgggggactgttgggaaggcatgattggttttgaaatgtgaggacatgatatttggaggggccaggggtggaatgatatggtttggctgtgtccctaccaaaatctcagtttgaattgtatctctgagaattcccacgtgttattggagggacccagggggaggtaattgaattatgtggcccggtctttcctgtgctattcttgtgatagtgaataagtatcatgagatctgatgggtttttcaggggtttctgcttttgcttcttcctcacttttctcttgctgccaccatgtaagaagtgcctttcacctcccatgataattctgaggctttcccagccgtatggaagtgtaagtccaattaaacctctttttgttcccagttttgttatgtctttatcagcagtgtgaaaatgaactaatacacctatgctttcaataccaccttcaatggaatagtgacagagagaagagagggacaccttgtccaacactttgaaccagatataggatagtcatttacacggcaacttgctttttatgagggaaacaaaaattctcaaagaaattatctcttcaaaatcagtttataaactgcatttctttttgtttcttttaaacagattaatcattcaaacacagagaaaaaaatatctttcatgtttcctccacaatccagaggtcaaacttcaattgcttttattacttgtacaaatgtttaatttcatagcaccaaatttgtcattatgtacacaatttacaataataatgacagtttaagtcatgtgagatttcagtctctacttaaaaactcttacatttaaagggcataatacttgtctcttaaattttaggactaacaagttcatttctgaatcaatgtactagagtcattgagtaatactatccttctcggagtctaaaatttgaaagtcaaccagtagtaatgataatggatgataaaactaaacccacaattttctctatgatagatccactgagtgtgtgcagttgagcccaaycatgcaagcattcagtacattgcaggtgacaaagtactcgaattaaaactacttcaatcaaaatgataaaayagttttgtatattcaaaagtcagtttctctgaaggaccattaaggttaatggaaacaatactttaacattaaagaataatatctatgagttttggaaatatacttttgataagctctacctcaagagccttatgaaataaaatgagaaaataaataatgtaaggtataatcatataaatgatgtaagtaagtggaatgccactaaacggtgaatatacgtaagtcattaattcaccaaaccaactatgagagaaagcaattaaggaaatcaaataatgaaaagtatattttcagattcgatttgaaaagcaaaataacaagttgacaagatgttcttaaaccttcctggagtcaacacagaaatccttgtgcatctacaggtggacacatgaatggcagagtccttatatgctcagaaaataaatgtaggaatattcagatctctgtaacttaagacaaaatagaatatctcacctaaagactgtagtaaacctcaaatttgtttcaatcttatttttttcgttttcctcaacggcttttttcttagcttgttctttcagtttccctatgtgtaacatttctaatatatcaatctcttgctcactaaactgcttttaccttcttccttcctacttttattattttcctatcttaaattcttcttcaagttgtcaaaggatagtatcaaacgaaaaaagtgttaaagtactacattttaatattggttttaaaatatttatttgttaacaaaatcacatgaaataatatcagttttgtattattagtcaatttaattattaataattgtgtctttgctaagataaccctggatacagataaaataactctccacatcttgaattttctgtcagaaaaacaacataccttaagaatcatattgttcaaaatcccaagttttcaggtaataagtactattggcgttattggtaaataacccaaataaattcccagttgatatgccttccttctgattacattttggagagcagttaattcttcaaagaaggaaacttaacgagacattgtgtgtgtaatggaaatgtgatgtacatgagtttatgcttacaaaataatcaataactacaatgtaaaatcagcactcaatccttgtaagaccacagtatgaaaatttctactttccttcaaaaagggtttgtaaatgattttaaaagaagaaacagcagcctcgactcttagaaaacttaactagataaatttgcacattacaagtcttaaaactagaaaccatattattaactgtgaaactatataattagtttctttgtgagctttcaattttttgctagataaaattaaaactgccaccaaaaaatgaggccattatgaacatgacaggtcatttgttgagaaaagggttatgtagaaatagcatctgataatttgttggaaatattagcatatagatggctatgaaatgtgtgaagtattatyagaagaattctaataaaaaatttttgcartgtaagtcgactatggttctatttcaaatgtagttaggttcttagccctaatggcaagcagaggctacactaaatgtatttaacctaaagacaagttgataagaaatttataattccactgttttttaaaaattacaaaagtaaaaggtatatacacataacatctacagcaacaaagaatgcaaaaacattcttttcacatagaaagagttaaatatacatgctttcaagaacaatagcagcttctcttaaactttcttaacttacctagtgttttctatcactaaaaaagctgtatgtaaatcattaagtttagactactgaatctatatcgttctttgtaaaccagactcaaagcatatttctttctaagttaacatgaacataatagaacacacagaaagaaaaatataactgtgagtttatatgcaaagtactggacaactttcaaatatatacatccttccttttttctttaaaatatctctctacactgatacttctggcagaaacctgacaatagtggctacgctaatcgtagcatactatttagatggacaacagttaattcatttgagcaaaagttttagagatctgttttagacctttaaatcaaactccagatatatacaatagtatcccttatccacagttttgctttctgcagtttcagttacccatggtcaatagtggtctgcaaatattaaattgaaagcttcagaaataaacaattcataagttttaaattgcacaccattctgagtagtgtgaagaaatctcgagccatcccgttccactctcacctgactgagacgtgaattatcccattgtccaccatctccacactgtataccctccctgtctgttagtcactcagtagctgtcttggttatcagatcaattgtaaggtagctcagagcttgtgtttaatatgtaccccttattttacttcataatggcctcaaagtgcaagagtaatgatgcttttatattgttataactgttctattttattattagtcattgtttttagtctcttgctgtgcctaatttataaattaaattttatcataggtatgtatgtacaggaaaaaatatagtatatatagggttctgtactatctgtggttctgtggtttcaggcacccactggggatcttggaacgtagccgccacagataatgggagaccaaacacaaagttaacaaagttaacaaggaaatggtaacacttccagtacgggaaaaaaaaaaaaaaacctatttagagatttttaagtgactcattcaacacacttgcccagaaggcactaatatagaatttgtagattttaaaaatacagtatgggcaggcaacgcgctgagggactaggcagagccgtggaaccgccgccaggtcgctgtcggtccacgccgcccgtcgcgctgcccgcccgctcggcgtcggccrccgccatgggagtgcacgtggaaaccatctccccaggagactggcgcaccttcccgaagcgcagccagacctgcgtgatgcactacaccgggatgcttgaagatggaaagaaatttgattcctcccgggacagaaacaagccctttaagtttatgctaggcaagcaggaggtgatccgaggctgggaagaaggggttgtccagatgagtgtgggtcagagagccaaactgactatatctccagattatgcctatggtgccactgggcacccaggcatcatcccaccacatgccactctcgtcttcgatgtggagcttctaaaactggaatgacaggaatggcctcctcccttagctccctgttcttggatctgccrtggagggatctggtgcctccrgacgtgtgcacataartccwtatggagcttttcctgatgttccactccactttgtatagacatctgccccgactgaatgtgttctgtcactcagctttgcttccgacacctctgtttcctcttcccctttctcctggtatgtgcgtttacctaaactatatgccataaaygtcaagttaytcattttactttttcattttggggtgaagattcagtttcagtcttttgaatataggtttccaattaagtacatggtcaagtgttaacagcacaagtgataagttaacgttaggataggaattggtgttgagggggttgcaagaatattttattttaattttttggatgaaatttttatctattatatattaaacattcttgctgctgcgctgcaaaaccatagcagatttgaggcactgttgaggactgaattattctccaagttgagagatgtccttgggttaaattaaaagccctacctaaaactgaggtggggatggggagaggctttgcctccaccattcccaccccaccctccccttaaaccctctgcctttgaaagcaggtcatgttcactgcgatgctggacactacaggtatctgtccctgggccagcagggacctctgaagccttctttgtggccttatttttttttttttttttcatcctgtggtttttctaacggactttcaggaattttgtaatctcataactttccaagctccaccacttcctaaatcttaagaactttaattgacagtttcaattgaaggtgctgtttgtagacttaacacccagtgaaagcccagccatcatgacaaatccttgaatgttctcttaagaaaatgatgctggtcatcccagcttcagcatctcctgttttttgatgcttggctccctctgctgatctcagagtttcctggcttttcctccctcagccacttctcacccctttgctgtcctgtgtagtgatttggtgagaggaatcgttgctgcccccttcccctagcaccatatatgagtctcaagttttattattgcaataaaagtgctttatgcyggcttttctcaaaaaatwaataaataaataaataaataaataaaataaaaatacagtatgcacctgttcaccaaaaatctatggaaataaaaaaattaaataaataactaaatataaataaaaatatggtatggaaccagcctaattactcatagaactgctgtttatggtttcttttgaataaacataaaaattgagactcccatcttaaaacttgagaaagttacatttgtcttatctgggttcctttctcaggaaaccacacatcaggccttccagacagtatcaaggaaaggaaacttacgagatcaccacatctggacaataagatgaaagactcctcacctatcatgatcgcataagtgaccacctgcttcctgttgaccaactcctcttctttacccctccctaattcctgttttcccacacatagttacatttcttccctgctatacaaacccttagttttagttggttgaggtgactaatttaaggctcatctcccattctcctcagctgtagcacccaaataaagccttcttccctggaaattctcattgtctcagtgattggctttcagggtggtgagctgcaggacctagaccaaaaccctggcatttttataacagtatgaattttcagttgtacaattcttataatgaagagtagtaatgtaacttataggtgacttggattaaaactattgaccggactttttagtttcaattacttaacactctaaatcctagtatatttaaatgtaaattaaatgcttgcagctaaaaacgcatcttaattcatattatagcagcttcaggttatgctttattgatctccatcctttagtatttgtatgcaactataagataaattttaaaattgtgaaataattaagggcaaatgagacaaactgtttgttcctgcccccaaaaaatctacacttctcttttttcttttctttctttctttctttctttttttttttttttttttttttgagatggagtttcactcttattgcccaggctggagtgcaatgacatgatctcggctcaccgcaacctccacctcctgggttcaagcaattctcctgcctcagcctctcaagtagctgggattacaggcatgcgccaccacacctggataattttgtatttttagtagagatggggtttctccatcttggtcaggctgttctcgaatacccgaccccaggtgatccaccaacctcggcctaccaaagtgctgggattacaggagtgcgacactgtgcctggccctctttttttcttttgtaataacatttcaacaatgcacatagccacccagattatattacctggcttctctcagaggtatggctagccatgtatcctatttcttaccagtgaactgtgcgagagagaaatgcacgcttcccgcatcttgcacttgccttaaagaaagatcactttcccttcccttcccctctccttttctttccagttgtaaatggtgcagtaacattgaaaccctcattatgcaagagcaaccaagtcagcctgaaaccttggcttacctcaagaagtagagcccacatgcccactgactgctaaaaggaataatgtgctttctggtttgagccttttcattttgggacctctttgttatcatagtttagcctatctctaatctatgtcatccaattatatatagtattttttaaattattgtaaaaatttaagttctgagtattaaaaaatatgttgttctccactctttgttactgaagcagaagttaaaagagaaaaacaagttttcctgtacttggctgactcactccaaggccagcaataggcagggccctggccgagatgtgataacagtatctaggaagccagagtccacaggaatgagccccagagacctcccaacacccccctcagagcaaggacaagaaaaccaattcctttgctatctcttcatctccttactgtttctcaatttcccaacttttgtaagttcctgtttttctttcaatgcagctacaaggtcacaagcttaaccctgtcactgtttgattaactgtgtttgttctgcttctgtaagcccacttgcctgcaccatgagtttcatgccattagactcccgccaccccaatcaaactagccagcccctttcaggagtatgtataaaagtcaagccctgtctttgttcagggctcagcttttggatgtgaatcttctgggccagtggccacttaaataaaatcctcctgtttcacccattggtctctctggtccttctgattcctgcaacattacaaattcacttgtaaggctacacatttatatttcactattattcaccatgattgtacaattttcataacaagactatttcagatttcaaaattatgagcctcatttcaagaaaaaatttaattgattatgtttaaaagcaaaagattcttcctgaatctgtggccaaaaaagttctattttctcatttctaatcttcagttagaatatagagtagcatgataaatagataaatattcttgtatgaattatgcataaagaggaaaagaaagaaaaggcaaggaacaattgccctttcaatttaagaagtgttastaagtgttgctgagctgatggagcactttggtgcaaagcccttgagccttagttgatggtctacatgaaccgcatgatctcaagaagagtaaaaatatatatctggtatcaaaggtaaagaactcaggtagctcccctgagagactactgctttgccatgtgaatgcagctaaaatcatcttaataatccccctcccacatccatcaccctccagcccccagcactttgctctgtgtgactgttagaagaccctaagctaattcttacaagtcaaatttttaaaaaatatataataattgactattatttctttaaaaagaaaagacacaaatatgtgtacttgttaaaataaactatatagatatgtaaataaaaaatggtaagaaacagaatgaactcatttttacatgacattctctatggaggttataccatgatctttcagtagccacaatttataatattaaattacagggacatacttgagcatttgcccctaacaaacttaacaattgtatactgagacgtaaattcaagttagtcacttgcgtaattttgggaaaattagaaatcccttcagatcctcaatataggaagaatggaggggattgctttaaagttgaaatttgtaaagtagttagtgtaagtcttagcatatagtatacacagcacatcttggtgattattttagttgcacaaattggaacatggttcttacattgtcttgaactttgttctttttcctcccaacaatataccatgaagatatttccaaatcagcacaaatatatttgcttcatctttttgtgtgaatccatgatattatatatacatagattaccaatatttatgtagtgttgacatttatgtagtttccaatatttttattattatagacaatgctgcagaaatatgtgtgtgaatgtgtgtatatgtgtatatgtatgtatatcttgacatatggtttcaaatatatcaattggggtaaatttctaaccatgcagcagctgggtcaaaaatcatgtgactttttttattacacagttattgcaaaatagcccttcaaaaagttagcagaagtatgcctaacataccagatcttcttgccaaatgtgggtattactaagctcattgaaaaaaaaaaaaaatgacaaatggattttattgctttaatttgcaaatatttaattacaagtgagccttacttagcatctttttatgttagtaaaatagttgcattttttaatgaaatagctatgcatgtcttcttttttattgaaagataagagcttcttatatattaaagaatatggacctttgccagttgcctttagatgtcattcttatttttctttgcagattttttttaaattttgtgtaagcacttttatcaatctttttctaatgtgtgtaggttttgtctttctccatttttctattttttgattacaagattattttataaaattatttattttacttttcaatatattgttttgatatttgctattttgggaatgtccattaattatctggatgtttggattctattcaccctatctagaaacttcagaaatatgactcccatattatataattgatatatgtatctaaatgtacaagtatatatgaacaaatatacatatctatgtgtctttgtctgtttgagctgctataacaaaagtaccatacacaggaggcttaaaccacaaacatttatttcttacagttctgaaggctgtaaagtccaagaacaaggtactgataggtttgctgtctggtaagcgcctggctcatagacagttgtcttttccctgtgtcctcacagtcctcacatggcagcaaaagggcaagagaactctcttgggtcttttatttatttatttatttatttatttatttatttatttaggcagggtctcactttgtcactttgtcacccaggctagagtgcagtggcacaaccttggctcactgtagccttgacttcctgggtttctcctgcctcgacccctcaagtagctgggactacaagccaagtaccaccacacccaactaatttttgtattttttgtagagacacagtattgccgtgttgcccaggctggtatcaaactcctgagcttaagcagtatgcccacctcagcgacccaaagtgctaagattacaggcttgaaccacagcactcagccttgaggtcttctttttaataagggaactaatcccatttattagggctttaccatcataatctaatcacctcccaaaagccctccttctaaaccgtcatatttagggttagaatttccatatagaaatttgggggtgggagacaaatatttagtttatagcactgtgtattcagtcattagaaaaagattttactaattggccaaatgttattcaggtaatcttctgggtctaattcggatcttttaatatcttagagctacaatttactgcatataaataatttgaattacagatactattaaccaaatgaaaatttaattccttacatttttcttacataactcctgaccactgaccttagtgatctaaaatatcacacatggaagttgatcaaataaaataggattcagtgatgcttaaacctttctacagacctttattccttatccttaagtaaatgattattagtgcaaatgcaggcaatataacttagtcatgacaagagacagatgctcaagcccacagaaattaaaatcaaaaamttcaaatagctaaaattttatagccagccttattatttatatttccccaaagtaacaataaaactgctatgtttcagaaatcttcagaaagatagagtttattcatataaatgcatattatatccattactataataccaataaaatatcaaatatcattaatttacagcaaaaatcataagccaagactttatatcctttgtactacgtagtacagaaatgtaaaaaaaaatcttatatgcagatttgtacatgaaagcaaatttatataactatggtaaatgtaactaatttttaatcagtattaatggtctgctgttcagagaagcctataagtaatgagaactttcagcacatcctgaaattgaatataattgctcaacgtgttctctagagaatttacctgagtttggaaactccggaaacaaccatattcatgttatatttatgctgtttcaaaaagattttctgtccagtaacgtaaaatgaacagactgctaaactctcatttgttttccatatcctctccctgctttctcttctactttccctggtgaacagatattcatttttcagattcatataacaatttgagccccagctattttgtaagttacaaagaccccgaggcttgagttgtggttgtgaatttctcactgtagttgtgtctcaagcaga

SEQ ID NO: 94460 - DNA, 35811 bp, Homo sapiens
gcccaggaacttacacagtactgtcatctctgacttctctgaccatcttcaaagatggtcctctgtaccctgtgttggaaatgctgtgggtggggagagaaagccttaccctgccgcagctcagtgttggatgtgagtttggaaagatgagtcatccagcgggattttctccaggccatgagccaraggtccagattttgttggtttatgtttggatcacaggatctgagtttctgaatgatcctattcctatgtttgtcttgtagtgcaaagaaaggaggtacaggcccgagctgtgttctaccccctcttagggttgggaggagctgtgaacatgtgctatcgaaccctctacatcgggacaggtgagccagccaggaagctgggagagacactgaatctgttcagccctaaagactgacacccttacccacagaagttagaaaggggtgagggaagccctttccagagttgactgctttaaatcagtggatagctagacaagagaaactaagaatagagacaatcagccagtcacggtggctcacgcctataatcccaacactttgggaggacaaggcaggaggaacacttgagcccaggacttcgagaccagcctgggcaacatggtgaaaccctatctctaccaaaaacaaatataaaaaattagctgggctaacatgcctatagtcccagctacttgggaggctgaggtgggaagatcacctgaggctgggaggtccaggcagtgatcctttttgtgcctctgcactccagcccaggcaacagagtgagaccctgtctcaaaaataaaagagacaatcagttccttgtcttcccttgttcaggcccttttgctttgtctttgcccagtgttgcaacagcagagatgaaagtcagctctgactactgcccagggaggcactttaaacactgcagggaagaacctaaggagaaggcagatgctttgtccctggtggtctttgaaagagtgatagactcacacatacccaatcttcagttagccctgtatctgttttttgttttgttttgttttccctaaaagtcctagagaccgatagctctgtatctggtacagaaggacagacagattagcccttaccctagaaacttccctttctttaaggtgataagattttctaggctctgcaccccgatgttgtattttcatagaaatatcccatcctcttcagtagctcactcttcccttctgggtagcagccacatgttctaaagcagatcagctggcagggacagctgttctttatcaggagcttggaaaagacaacagtttttgttcaaaaataaaaggggagggccctgagctactcacccttgaagtctctgctagtgccaacccagaagctaactctctccctgtcttacctccccgacacatgcaccttacaatctgttctctgccttccttttcctctactcctgccaccttgcaggagctgacatggatgtgtgccttacaaactatggtcactgtaactacgtgtccgggaaacatgcctgcatattctacgatgaggtgagggccggagatgcggtgggagggagctttcccaacctgaggcctctcccaggcagtaggtttttgttcagtgccctgaggggagggaagagggattgggggtcctctctttttcttccctccctgtcattcctggaggaggagagtcttgatgtgaaatagcatcctacctgggaagctacctgcttcccaggagcagggctaccatttttcctgaggttagtcacaggcacaacagagggagcctaccctaaagcaagggaggggaccagcatagaaggaagccaagccttgtgggtgtgtccctgtgaatttcattatcatcacgggccagtgagtatcataccaagaggagcggtgctgagagggcagagtgaaggagtgggagagtagggagtgtgggacaccagaaggaaagcttccctgaggaggtgtctccagcccccttctgaaaggacaggggccatgactggggaggcaagtaaggactctctaggtagagtagcacggccttctccatatgtcctctctccccttagccccaggccccacacagcagaccacacatcttatctcccctcctcctcctcagaataccaaacattatgagctgttaaactacagtgagcatgggacaacggtggacaatgtgctgtattcatgtgacttctcggagaagaccccgccaacccccccaagcagtattgttgccaaagtgcagagtgtcatcagtaagttggagcagagatctgtggccacaaagctgaggccccagtcagggtggttctgacttgctgcccatggtctgtctcttgccttcccagtcctattggccaagctctacttcctcgtgggcccagggcaggccacagagaagcaagtgctgagtacccccatgtgtgtacacacctgtggggacttcagactccaccaaccctttctgagcatccttcctccctagtcatgcagcagttggaatggggagatgcaggagcccaaccttggcaaacagcccacatgggttggctgctcactgttcctcttctgtgaccatccccctttttcccagggcgccgccggcaccagaaacaggacgaagagccaagtgaggaggcagccatgatgagttcccaggcccaggggccgcagcggagaccctgcaattgcaaagccagcagctcgagcttgattgggggcagtggggccggctgggagggcacagccttactgcaccatggcagctacatcaagctgggctgcctgcagtttgtcttcagcatcactgagtttgcgaccaaacagcccaaaggcgatgccagcctgctgcaggatggggtcttggccgagaagctctctctcaagccccaccagggccctgtgctgcgctccaactctgttccttaggactggcggctaccccgccactggcctgtacacccacccaagactcctgcaatgcaaaaatgtacacaaaccaagcccgggtgttttctatactctaccagaaacccttcaactacaatctttgcatgaratgaagaaaaccttttgactgttttttaaaaatcctttttcttttctcaagttctagggggcatttgcacatatatttgtactcaacatttcatgggaaagcggcagacctgagctgaggaacagcgtgggcagggagggaaagacccagggtctggacacttcctccaacacaaaacccttccccacccacctcctgctccctccccctcgcccaccattgtaaaataatcagaaacttgttctattttgtggcagtgacaatagttttatattaaaagaaaaaatacagttttcatacagcaaaatctatacaatatcattgttttatttaatataaagatcgctacccaccttccttccatggttcccaccctccacgttattttccctttctgcagcggttgcactacaggtagctactgtgtattatggacaaatgagaaatgaattctttttctggctgtccatctattttatttcaaataaggaaaagtgtatttggattttgtgtaaatacatctagtgatgacattttttcaatgtttttaaaaaccgtgtacagtactacatgtggtagagcgttttctcaaattgtctattgtagcaaaaatgtttttgtcgtaaacctgttttgtctcctttttttgttctcttgccacttctctcctcttcctcctgcccctggttccctcctctcctcccacccccacaaccagtaccaatgtacatagtaattgtaatgttttagactttacagaaactttcctgtattctgtatataaaaaacaaaaatacttcaaattgttttctgactgtctgtcctacctgtcatcacccttagaggagaccctcccctagatctgggtctagcaggtggggggccttttgaacaggtctcattcccatagggaagtttggtaggggaggtgttggagaaaagtgagccagggtgggtggatgacaatggaatgacatgggtgcgtctgctggcccggggggagctgtttctccagagaaccctgactgatagtggaatctagtcttgacctgtcacttctagtcatgtgatctgcagtcacacttctctacaactgctattcctcatcaaaaaacgagtctgctgcattaccttaattctcaagtcccggggaccttcattaaaccaaattccatgctttcctcccagatcttagtgaaaaactctccaggaagttttcctgaggtcagcctcctcagatggagagcacctctgtgtatattccagcactgtttgtgtaggtgcatctgcttgtgtgtcaggattttgccttagggatagaaaatgaatattctacccccagcctcatcccacagcatctacaatggaaacccgaatccgcagtgcagctaaataggaaactggccctggaatctgaggtctgtccctgactttcatctgcccatgcaggcgtcatcactctgctcccggtgccctaatgggctttttgaactccctaaggacagaaacttgtatatcttccactcggaatttccaagtctaactacactgctgggcacaccataagtgccaaataccaggttctaaattgtactgaatgtatcaggcaacggccttctgccctggaatggtcttacccatttgttcctagccagccccacccttcctgccatcatggtcacttgtaattgagtgatggagcttctctgcctgtctcttatcacctatgagaaccattccaaaggcaaatttcctcctgaaaggcaataacagattttactctctatctcttcctgcttcccttcagccatggaaggcactagtggggttgaggtagggagatacagagggggaatgaaggagtgaattctgacaccccttaactgcctgtgccacctttaacagtgtcctctctagcctgtgtggggagaacacggaagaatcctagaagctgggggctggatgtgaagataagaaaacgaaggatttggcccagtgcagaggctcacacctgtaatcccagcactttgagaggctgaggcaggtgggtcacttaaggtcagaagtttgagaccaacctggccaacatagtgaaaacccttctctactaaaatacaaaaattagccgggtgtggtgtcacacacctgtgatcccagctactctggattctgaggcaggagaattgcttgaacccgggaagcggaggttgcagtgagccgggatcacgccactgcactccagcctgggcaacgagagtgaaactccgtctcaaaagaaagaaagaaaggaaagaaggaaggaagggagggagggaaggaaggaaggaaggaagggaggaaggaaggaagggaaggaaggaaggaaggaaggaaggaaggaaaggaaaggaaggaaaggagaaggatttgtgcagaagggaaggaaggagaaggatttgttcttagagggaaaagcatctaggactagactcaaagacacacgtgtattcatgtacacacctaacttcagaagggagggactgtgctacatacacctcgagtaaacatatggagatatgcaagcacatgcactggcagagactacagatgcaggcacatacctggagggactctgccagaatgcacacaaacacctacaaggtgcttacaggagctcacacacaggatccagaggcacgcacacaacccaaagggtgatcctcagggacatgggcacatacacacctagagatcattcacatacaagcgttgcagatgcatgcacatacctagcgtgcactcacagggtgtacgtggacacacacacccaggagttcacacaggcacacacctagggggcgctcccagggcccaagcgcacacactcacctcaaaggtgtccacagaggcacacgcccccaggacgccgacgcacgcctagggggcgctcgcagggccggcgcgcacccgcacgcgcacacgcccctgcccagcctcctgcccgcctccgccttcggaggctgacgcgcccgggcgccgttccaggcctgtgcagggcggatcggcagccgcctggcggcgatccagggcggtgcggggcctgggcgggagccgggaggcgcggccggcatggaggcgctgctgctgggcgcggggttgctgctgggcgcttacgtgcttgtctactacaacctggtgaaggccccgccgtgcggcggcatgggcaacctgcggggccgcacggccgtggtcacgggtgagtgcggaggcgggtgagtgcgagctggcggggcgcgcggagaggaggccgggccggcggtagcagcggcccgccgggctcagctcagctcggctcccgcccgcggtccgcaggcgccaacagcggcatcggaaagatgacggcgctggagctggcgcgccggggagcgcgcgtggtgctggcctgccgcagccaggagcgcggggaggcggctgccttcgacctccgccaggtgagaggcagcgggggcgcgtgggacggtgagccgagaacccgccgggacacagagaagccagcaaaggggctgcggaggatccgggtccagggaggagagcgcggcgcgggcggctgagcgcgaagagggagtgcacggagcgctggggtcacccgaggaaggcgcaccagagccgagtgggggaggggcttcctgaaggccgtaattgcagttctgagacgtttaagcatcagtagaagttgggttaatgatcagtaggaaagggaacagcagagggcacagcataagcaaaggctctgaggcaaagagagctggactgatctgaaaaactgagaaaaagatttaatgaggctggagcacaaagtatgaggaagatgggcaaatgagggggctggagaacattctagagcctattgagaagcttggattttatagattgggcagcagagaccagtggagaccatgaacagccctcagtaggctccggactgtcagaatagcctttggaaggaactcctttgtggctgcgtggtgcctggagtgggggggcaagagcgggagagaggagaccagtgagaagttacagattttagggtaaatggtaatggggaaaggaggtgataataataatagcaagtacctacccagtgctgctagagtgtattttacacgttaactcctttcatcctcacaaaagctcagtgagattgggactgttgttattattattccctttacgcagtgagagaactgagacccagagagattaagtatcttgcccaaggtcacactttagtaaaaggcaaagtcaggatttgaatccacacacttatctagtacactctaagacacaggggcagattttagtaaacagtaggagatggactctcagaatttggtgcctggggagagggaagaggagagagatgcctggtgacaagcccagcccttgcctctccacaggagagtgggaacaatgaggtcatcttcatggccttggacttggccagtctggcctcggtgcgggcctttgccactgcctttctgagctctgagccacggttggacatcctcatccacaatgccggtgaggggcagcaggccctgcgtgggggtggggtggcgggtggccaggggcaactgccccctccagcgggggccctgctggggccagtggacacatgggaaggatgcccccttctcccatctcatagatagggatgccaaggctgcagagctccttctggagcagccgctcacatttagcctctgccccaggtatcagttcctgtggccggacccgygaggcgtttaacctgctgcttcgggtgaaccatatcggtccctttctgctgacacatctgctgctgccttgcctgaaggcatgtgcccctagccgygtggtggtggtagcctcagctgcccactgtcggggacgtcttgacttcaaacgcctggaccgcccagtggtgggctggcrgcaggagctgcgggcatatgctgacactaagctggctaatgtactgtttgcccgggagctcsccaaccagcttgaggccactggcgtcacctgctatgcagcccacccaggtgaggtctggttctttggcttccgattcccctctcctttccttgccccatcctgtgccccccacaccactaccgcctccccaccctccatccctcattgagtcacagaatctcagggcagcaaggaagcatagtccaaggagagacctgttccttgctgctcttggaaccaggttctcctggtttaggttcttcctctcacaccacaagcctgggtcctcagccctggggggtatatggccatgaataagacctggattcccacccccaggagccatctgcactgactgaactgataatgatgatgatgatagctaataattcatccaagaagcatttaccgagtacctactctgtatcaggcattacttgcagtgctggggatatagcagtgaacaaaacaaagaccctgccctcatagagtttgcattctagtttggaggagagggagacagccaataaatatatacgatgaggggtggtgatagagtgctctgaggaaaaaggaaacagcaaggggcaaatggaacgggaatatggtgtggcagtcaaggaagacatatctataaaggtgacatttgaacagaggtctgaaagatacatggctcactggggagatgcccagaaaaagagagaacagtgcaaataataagtgcagaggggctggaagcggtggctcatgcctgtaatcccagcactttgggaggccaaggctggtagatcacttgaggtcaggagttcgagaccaacctgggcaacatggtgaaaccccatctctaggctgggcgtggtggctcacacctgtaatcccagcattttgggaggccgaggcgggcaatcacaaggtcaggagttcgagaccagcctgaccaacatggtgaaaccccatctgtactaaaaatacaaaaattagccaggtgtggtggcgcgcgcctgtaatcccagctactcaggaggctgaggcaggagaatcgctttaatccgggaggtggaggttgcagtgagccgtgatcacgccaccgcactccagcctgggggacagagcaagactccatctcaaaaaaaaagaaaaaagaaaaaaaaaagaaaacctgtctctactacaaatacaaaaattagctaggcattgtggctatcacctgtagtcccagctattcaggaggctgaggcaggagaatcgcctgaacctagaggtggacgttgccagtaagctgagatctcgccactgtactccagcctgggtgacagagcgagactctgtctccaaaacagaaaaaagtaagtgcagaggccctaaggcagaagttcctggtgtgcttgagaaaggctaatgtggctggaacagagtgaggggggagagtggcaagaggtgaggtcatagagaggcactgtgtcctgtagggtttggagggaggttcactataggcattctggcttttactctgagtgagataattggggatccagagcaacactttgtcttatggaagaggttataccaggataacaagatctgtcatattcatattaccatactgcattttagatagtcactgcctaaggctcattagtaattataatagcgatgatcacaattagcctttattaagtctttattacactccatatcactaatgtccaaaatagtggctggtatactgcaagtacttaataaatgctggttaaacaaggaacaggacttgagctagaagaaaagatggagagagactgagaattgtttcagacatgggacacagcatgaacaaaatctgggatgtggggtgaacaagcagtctggatggaagcgaagaggcttcatgcaggaaatgagtgaagtcacctcgcagaagccccgaatgcctggtaaatactatcctggttcccttgaaaccagattctgtccctgttcttctagctctgttctattttttttgttgttgtttttttttttaaagagacagagcttgactatgttgcccagtctggtctcaaactcctgggctcaagtgatcctcctgctccgcctcccgagtagctgtgactgtaaatacacaccactgtgcctagcccractcctttctttcttcctgcctacagggcctgtgaactcggagctgttcctgcgccatgttcctggatggctgcgcccacttttgcgcccattggcttggctggtgctccgggcaccaagagggggtgcccagacacccctgtattgtgctctacaagagggcatcgagcccctcagtgggagatattttgccaactgccatgtggaagaggtgcctccagctgcccgagacgaccgggcagcccatcggctatgggaggccagcaagaggctggcagggcttgggcctggggaggatgctgaacccgatgaagacccccagtctgaggactcagaggccccatcttctcwaagcaccccccaccctgaggagcccacagtttctcaaccttaccccagccctcagagctcaccagatttgtctaagatgacgcaccgaattcaggctaaagttgagcctgagatccagctctcctaaccctcaggccaggatgcttgccatggcacttcatggtccttgaaaacctcggatgtgtgygaggccatgccctggacactgacgggtttgtgatcttgacctccgtggttactttctggggccccaagctgtgccctggacatctcttttcctggttgaaggaataatgggtgattatttcttcctgagagtgacagtaaccccagatggagagataggggtatgctagacactgtgcttctcggaaatttggatgtagtattttcaggccccacccttattgattctgatcagctctggagcagaggcagggagtttgcaatgtgatgcactgccaacattgagaattagtgaactgatccctttgcaaccgtctagctaggtagttaaattacccccatgttaatgaarcggaattaggctcccgagctaagggactcgcctagggtctcacagtgagtaggaggagggcctgggatctgaacccaagggtctgaggccagggccgactgccgtaagatgggtgctgagaagtgagtcagggcagggcagctggtatcgaggtgccccatgggagtaaggggacgccttccgggcggatgcagggctggggtcatctgtatctgaagcccctcggaataaagcgcgttgaccgccgaagctgcgctcactcctgcctcaacgcgccggccccgccctccgccgccacacttccggcggggctgcgaccgcagaggggcgcgggcgagcgagcgggcggccggccgctgggggtggcgggataggctgggcgcggccggcgctgcagacccgctgctgttgtccgggtctgtgcggtcccgagggccctccgtgccgccggcgccatgggcaattgccacacggtggggcccaacgaggcgctggtggtttcaggtgagggggcggcgaggaaggtgggagctgtggagggtgctcggggtgggtgcagggctggggagtgcacggggaagagctgggcctgagtccaccgcgcggcgcagggcgctggcccccgggccgcacctgaggccccttccaagagagatctcgtgctcacgctttccttgctgcgcaccctcgggcacccaccaggggctccccctcccgctgtgggttttcctgtgtttatttgcttctcctccccctccctaggcgggcctccccgccgctctactgtgaggttgggggtcccgaactgaagccgcggggttccaggagggagggaactggtggttccgggaacgcagaggtttggctggattccagcgcccgggatggggggcgggtcgcgcagccctggagggcaggtgcctgtatggggaggggccctgaaacagaggtcgtttctcggcacagtcagacccgttaattccaagcaggctggggcttgttggggattaccggcactgcccgcccaggagacgcggatgcggcctctacaggttgggaaacccggttctgggcagtgcagtttgggattgcaaaatgctgcaagttccagaatttctatctaggtggggcatggggactgcggtactggggaaaaggaactgctattgagattttatatttggggcgctttgagaagcggctgacaccttgcaagccaccgggttgtgcagctccttgctctcaggagctgggggacgggggtcctggtgcctgacagcttggaggcctggagctggaggaatttctcttctctatcttcccactatcagtgctgattttttcagcctgcgtgcagatttggtagaactggttactgaagagatagaaggggatagaagccctgagccaggcctcacagctgccaacccttggagaggggtgataaatccactgggaattttcattccaaaacatggcttcaggctcactttggatctcaaaatcaatctctccactgggacatccccagtgtgtgggagataagtaccctacccccctgaagaccagaaatagccttgaggacagaagggagactcccagagaacactaaatgcagacttgctcctccataagacctaaacctgtctcccagtccccacccttagagaaggcttttagagaccagaatctgcactgcactttgtttttcttgtggaatttccttcaggaagcccagactctgagctgagaagacaaaagctccagttccatccttgtggaaagtcttgggactgaggggcaagaagagccccagagatgggttgctctgtgccttccagttactgagaacctggtcttcagaacagaagtcaatgcactgttagcttcaacgctattttaggggtgggaagaggagatcttgctgagaactgaggatgctggagtcagggaagcagagaaggttggcgggggtgacagataatgcctggcacaatgataccttgggatttgagatgatcaagctgagatccagctccctcttgtgtgtggactcctgagagagcagagcaactgcccccacccctgcccccacctgtctgccttgctccttggacctgtgtctaagaccagaggcatctcacccagcccagtttcagaaggaggatgctaatacatctcatggtcatcttttccatcctttcttattatctaacttccctccttcagtttgtaacataaaaccttttttctctctacttttgaaaattttaaaggggaatccttttcatttggatggggttgggggatggggataaggggggagaaaagcataattttattttcactcaccctaactgaaatttagtgttttctgtgattatgaatgttggcaacaattcatgatagtattagcaaaaagtttcctactacactacagttatttctggtaccttgaaaatctattggccgggcacggtggctcatgcctgtaattccagcactttgggaggccgagatgggaggatcaactgaggtcaggagttggagaccgttctggctaacatggtgaaatcccgtttctgttaaaaatacaaaaaattagccgggcatagtgatgcacgcttgtaagcatctcaaaaaaaaaggaaataattcatctgtattttggcattaagctaataattagatttaccactagatcttactatttaatgtattaataaagaatgacatattactaatattgcacacttggttttaaattttgataactttcaatataatttcttatgtatttattttatgaatttataagtattcttggccagactaatgcctgtaattccagcaatttgagaggctgaggcagatggatcactcgaggccaggagtttgagaccagcttgggcaatatggcaaaactctgtctctaccaaaaaaaaaaaaaattagccaggagtggtggcacatacctgtggtcccagctactccggaggctgaggtgggaggatcgcttgagcccaggaggcagaggatgcattgagccaagatcacaccactgcactccagcctgggcaacagagtgagaccctgtttcaataaataaataaataaataataaacaaatattcttgaggaggggtccttaggcattgctggattgctaaaggggtatgtggctcaaaaaagactaaaccccctagtaggatatggacttttttttttttttttaaatacagtcttgctctgtcacccaggctactagagtgcagtagcatgatcacagctcactgcagcctcgacctcccaggctcaagcaatcctcccacctcagcctcccaagtagctgagactataagtggacgccaccacactcagtatttaaaaaaaaaaaaaaaaaaaaaaaaaaaggtcttgctctgttgcccaggctggagtgcagtggtatgacttcagctcactgcagcctccacctaccaggttcaagccattctcatgtctcagcctcccaagtagctgggattacaggtgcacgccacagtgcccagctaatttttatatttttagtagagacagggtttcaccatgttggccaggctgttctcaaactcctggcctcaagtgatccgcccacctcggcctcccaaagtgctgggattacaggtgttagccaccatgcctggctgctaatttttaattttttgtagagacagggtctccctgtgttgcccagactgttctcaaactcctgggctcaagcaatcctcccacctcagcctcccaaagtgctggaattacagtcatgagccatcatgcccagccaggatatggacttcttgactagtaggaagaaagtgggctggacacactggctcacacttgtaatcccagcactttaggagaccgaggtgggaggagaacttgaggcccagagtttgagaccggcttgtgcaacatagtgatgtaacaggacgagctgcagacaaaacttctcagatactragttgtagaaggaagggctttattcagctgggagcatcggcaagctactgccttaaaatccgagctcctcgagtgcccaatttctgtcccttttaagggctcacaacactaaagatttcacatgaaagggtcgtgattgatagagcaatctaggggatacgtaacaggggtttcatgcactggtagtcagagtgaaacagaataggacagggagtttcacaatgttcttctataaaatgtctgcaatctatgaataacatcggtttctaagttatgagttgatttttaactactaggtttaggccaggcaggcccaggcctggtttcgggcctggcgctgggctgcctgtctttgatttcacttccttgtttttttcttaaaacaggtactgagtataaaacaatatgagagggtctctctcttccctcagcgagaccctgtctctacaaaaacaattctttttaattagacaggcattgcgatgtatggaaggctgaggctggaggatcgcttgagcccgtgagttcaaagctgcagtgagctgtgattacaccactgcattcagcctgggtgacagagcacaatactgtctcaaaaaaaaaaaaaaaraaagaaggtggaggaaggccaggaagggcaggggatgctcctgagagggcagagtggtgggctgtgtcctggggaagggctaagggagtggaacagaggttatcgtggggtattttgtggttcttcagctcaattgtggaaagggaaagcaagttgggttagaaagaatagagtgaggtacagttaggagaaacttccaggtcttgagacgagtaagagttagggaaatcaaggaagaggcacctaactggcctcttgggaggggtgctcaggctgagtgaccaggaagctggcaggaagttgccttccaggggaggatgctggtaggggcgggtaatctggcagtttcagcttcctgttgttgctacccttgggaacctggcaatgttgcccttggccaaggcccagcttgagctgtggcagcctgctccccaagccaaagaataagttaaaggtaaagggtgggctgggtgcggtggctcatgcctgtaatcccagcactttgggcacctaaggcaggcagatcacctgaggtcaggagttcgagaccagcccggccaacatggcgaaaccccatctctactaacaatttaaaaattagccagacgtggtggtggttgcctgtaatcccagccacttgggaggctgaggcaggagaatcacttgaatctgggaggcggaagttgcattgagctgatattgtggcactgcactccaacctgggcaacagagcaagagtctgtctcaaaaaaaaaagataaagagtggccatctagggccgggcacggtggctcccacctgtaatcccagcactttgggaagccgagccgggcagatcacgaggtcaggagatcgagatcatcctggctgacaaggtgaaacccggctctattaaaatacaaaaaaaagctgggcatggtggcaggcgcctgtagtcccagctgcttgggaggctgaggcaggagaatggcgtgaacccaggaggcggagcttgcgccagtgcactccagcctgggcgacagagcgagactctatctcaaaaaaaaaaaaaaaaaaaagagtggccatctaccctgtccatcccccaccccactcccacatcctacccccaccactaccaccttcccactgcacattgagaagtcccatggggctagcccaaggcagccatgccccagcccccaccaggccagaagatgtagaataagctgtgatttttggtccccttccagtttcacttgatcctgagatggtttgggtttcagattgagtgcttgtcctcagaggcctccccaccccacttcccaggtcagagaagcccggaatggcttaccttgaacagcagccctgttaacaggtagttctaccccagagaaacagacagagacccaggaccccgtcttactgttccctgcccacactgctctttgatccctggacctctggttctgctgctggaacttcacgcatggcagcagacccagaaaactgggttacctacctggtaagcagtattagatgccagctctccaacctttcaagccctccccactgggggtgaggtggagcggttctttatttctttgcctccacccaccgaaaatttgtccccagtttcccattctctccattgtgtctgtttctattattgtcctcaacacccacccaaacccagactctacagctgcactgtccaatgtggacaggagccacaggtggccatttaaattaattaaaaaattcagttccccagtcataccagcctcatttgaagtgcacaacagtcatatgttgctagaggctgctgtactgcacagcataaacacagaagaagatatagaacattcctaccctcacagaaagttgtcatggataagactgctctagaagttgtctgccagtatcagccaccatgccttgcctggattactgcaagagaccagtctccctgatcccagtgtcttcctcctcatgcaaagtggtgtgtgtttctcaagggtaaccttgctccctgtcactcacatacacagcttcttggcctgacacacaagacactgtgtgatctgccctctgcccctccacttgccttattccctgccgtgagtcctcagagacactaacccagctgcatgaaactcccccagacccttgaccttgggagtcagtcaaccttttgaggttctttgaagctttcatgaaaacctaactttgtgaacatggaaatgataatgctcggccaggcgcggcggctcatgcctgtaatcccagcactttgagaggccaacgcatgtggatcgcttgagcccaggaattcgagaacascctgggcaacatggtgaaaccttgtctccacaaaaaatacaaaaattagctgggcatgggggcacacacctgcggttccagctactcgagaagctaaggtgggaggatggattgagcccaagaggtggaggctgcagtgagccgtgtactccagcagtgctgtactcgtgtacagtgtactccagcctgggcaacagaatgagaccctgtctcaaaaaaaaaaaaaaaaaraaatgataacactctctggtttttcccagatcacatatttcctttgaatactgtttcctgtacatttttttgcactgcaagttaactgcctgtccagttttatgaaggtttccttgaacttgatgaggaattttggcattaacaagagagttcactacaagaatctcaggaattgccgggcgcagtggctcacgcctgtaatcccagcactttgggaagctgaggcgggcagatcatgargttaggagatcgtgaccatcctggctaacacggtgaaaccccgtctctactaaaaatacaaaaaattagctgggcgtggtggcgggcacctgtagtcccagctattcgggaggctgaggcaggagaatcgcgtgaacccgggaggtggagcttgcagtgagctgagatcgcaccactgcactccagcctgggcgacagagcgagactccgtctcaaaaaaaaaaaaaaagaaatctcaggaattgatttttctcgtttctgtatagggaacatatagaacatgtctacagcatggatctgggttgtggctgaattagatgttctgtgtagctgacacactgtttccaagaaccacttcctttttaggcctttttgctttctccacttctcccattggtaccacaagttagcctttgttttgaggccttgccttccccacccgttcccatgagaggaacaaagtcattctgaatgttttggaagtagagaaccagcctcactgagatgtgtctgccaggcagaagagcaaaccctctcgccttggttgggagactctttcttccctcccagccccccagtgttgtccctgtctgcgttccctctctgtctacaccccccgtgataacaggtgaactccagggcatacttgtttattgaattaattaattaaaaatggaagctggaccaggcgcggtggctcatgcctgtaatcccagcattttgggaggctgaggcaggtggatcacaaggtcaagagttcgagaccagcctggccaacatggtgaaaccccgtctctactaagaatacaaaaattagacgggcatgatgatgcatgcctgtaatcccagctactcgggaggctgaggcaggagaattgcttgaacctgggaggcagaggttgcagtgagccaagatcacgccactgcactccagcctgggcaacagagcaaaactccatctccagaaaaaccaaaaaaaaaggaagctggcctggcgaggtggctcacacctgtaatgccagcactttgggaggccaaggcaggcagattgcctaaggccaagagtttgagaccagcctggccaacatgatgaaactctgtctgtactaaaaatacaaaaattagccaggtatgctgtggcgggcacctgtgatcccagcaactcaggaggctgaggcaggagaaccacttgaacccaggaggcagaggttgcagtgagccgagactgcgccactgtagtctagcctgggcaacagagtgacattctgtctgaaaaaaaaaaaaagctttttcagatcacctctgcccattgtcctgttctgttcttcttttctctggaagcacttacattctaaactattcattggctatccttctctttatgtaaattgcctgtctaccaatctagactttaactcccataagggtagggagaacttctctctcattgatgtgtaacctcagcactaggcacccaacagtaggcgttgtcaagtatcagagcaggtaaaggacaaaagttgctatcagtgggctggagggtagacagacccaagaaccgactgacttgcggtggtttgctttgctccccagggggctgttgtggttccgactataaacagtacgtgtttggcggctgggcctgggcctggtggtgtatctccgacactcagaggtaagcacctgggggctctaggacctgtcatggagtgggccagggagagaggggcttccagcattgttctgcttcactctgagggtcagctagagcatctaccatttccacattccattctggcggtggaggggtggggttgggggggacttcctaagaagcatgtaagatgggttgcacaggggtgcaggagacatgcatcaggaaggtctgtcatgggcaccccctccttagtgggtgttcttttttccactggaggtggcattacttctgtcccagagaattcagggtcataacccaggcagaatcttgatttcctgattataactcaaagttatttaagaagtctttattatacgcccagtttggagtgggcatatgaagggaggaaaggctggagggaccccatgcacacccttacccatgcaggccctggggtaatccaggcagggactatgtggcagagaatggacatatagtcaaaagtggttctgtgacagtggtaagttagacagggagggggacctaacgaattagtgctggggctgagcaagacaggtctggacctcctaaatcagtctggaaagacttactagaggaagtgagatttcagctccccagagggcccaccatccagctctacctgccgctgcctgcagagcctagggcagggccagacctggcctctcctgccaccctcactgcccacccgggagatgaggcacgccagctacctttccacgatcgcccccttcctcattatgggagatggggcggtggggaggggaggagcagatccttcccaaccaggacccaggcaacaagggcagcagagctgtgggcatgttgcaaggtggtcggtcaccccacaggggaaatcatggagattccagtggaaaccccctctgccccatcccccacccgtcagcagctcacgtctgcaccaagctgctagtgcttgaggctcctgggagtctgagggcatctgctagggtcggggggaatgggaagcatggcacaatggattaacttcactggttctcagtaaccgctgcactctcccacctctcccctcactttacccgaccagaggtgagcgatgctggggactcttctggtccaaggctcaaagtgtcagagtaatcagtagtggccacagcctccactcgagaggatcctggccacacctgagtgggccagtggcctgtcagaagccgtggggagccctctccagacatactgccaccccacacactgtgcattcccagcacaacagagtatcttgtccagacacctgccctgcgtgggcagccactgctaggccaattcccctgcagtcctttctccagattcttggtcccctgctctcccttcctgctccagggagcagagccaggacagaagggccaagcctttctgacagcaagtttggaagttaaaggtgaagggccttgtatctcttcccaggacaccgacctcacacccaggctctacatcctccctctggtctcacttgctgggtagtctgagccagtaatccttctccttcttacaccttttctggggggcagcctcttccctagtccctagcctgcttgggggacgcctccacaggctggggctttatttccctaggctggcaggagcctctcgggtcagagtagaggcttctaactcagcctggatactcagcctccctctcaaggtcctttctgcagctgtctatatgtcacgtgcccttggggtcagccattcttcttccaggctcagtgacccctcctgctgcattttgctgccacatcctatactatcccgaggccctgatatgggcggctctctccctcttacctgagcaattcttccacctttggcatctgagctgcagcctcccttcttccctccccactacccttcctccctccctccctctcccctatttccctctctccttccccagaagagagcttggtggrttcctgtctgagctgggtcaagaatcctctcaggcccaaggatgctagtgttaggggctcgaatgaaggcaacttttgcacatctgcatggccagtgccccagggctggcactgtgggggtggcccctcctgggattgagatgggggctgcacatcgactgctgctccttatcaccccctccacctgcttctgccccttcaccctcggcctctgtcctctcttccttcctctgatttagggaaaccttccacactgtccacagcctggcctctgcctagacaatcaccctgcacacagactgcctagggaggcccagccaggatgggccagggagcttcgaggcaccttgttttctttgccaataatcttctctctgcccctggccaactttggaaattcccaattaaatgcctcccttatctcccggttatccctgagtattctggcaggagcacactctcccccagccttccttggccccacatcagaacatttgggcttttctggcctcaccttgccttagtgatagatagtgcagacctggcggattcggcatttgctaaagctcaggagtccccagaatagcctcccactcccgatttctggaaacacaggtttacctgtgtgaagacggggggctaagcctcagtctcccagattgcgacaggatccctgggaaagtgaggtggcgggcaacccaggtgccctgtgcacaagcctcctgacctcaggccgcaggcccagggtggcagcaggcatcttccccagcctagcaggtcctcactaaaagggtttgggggctagagaagagacccagaggcctcggatcagcacaggaggtcgctgctgtcctgcagccctcggctgagctggcagttggggggttggattactgacagcatgcccccccccgcccccaggcgtcaggcatcggtgcttgtctggtaactactgtgtgtgtttgctgtgtcccctccttcccttcctgtccctacctctccccaccccctggctgctcctcagactgtctctggaggttatgaccatcctgtgtcgctgtgagaatattgagacgtcggagggggttccactattcgtaacaggggttgcacaggtaataacccacctgcttcctcctccgtgtctaaccttctctcttcctgccctgcggggcctggcagacaggagccgatggactcccctcctgagaccgtgccttcctccctctcctcttttctctcctccactgctctgggtgccaggatggatccctgtacatccccaggtcccttgcccttgcctattggactgcaagtggggaaacagcaagggattctggaagctctgccaagtctgccagtgagtgtccctggatgccaggccttcgttaccatgcagccatagctggtgaaatctattcttgggcttgggtgttaattagctccaaatgcttactctgtcatgtgtgggttcccctcttcattgcttcattcaccagctctctactgagcaccttctcagtttgaggcatgtggactgcaggagcgaacaataaaaagcccctgccccctcagagcctgtgtgccagcgggttcccagcctggaagaggcctgaaccacatctttctcaccccctccctctgcattcagttgcccttcagcctctgcttaggcaaaaacactacaccaccactcccttcttcacccatcctgccatctctaatggggaaggggaccatccccatccccttagcccttgtagccatgggaggtgcagaggcctgggaggcttggagcaccttgtgtggaaggggtagggtccaggcctccttcaatactctatttgatgcagtcctctctccttccatacccacacctacacttgaaacacctgcaaagcccagatcccttttaaagtgggtgactgtggaccctggaggagtcagattgcatggccagaacaactctttccagggttaacactccttggccaagaagctctagtgtgacttcagtctaaattccccatgtgacccacctgggcctaataccagacatgggtttcaagtcaaaggctgcagccaccaggtagggcttctctggcaaggggcaggtacagaatcacttccatcttagcccagcagtaggcatactccaggatgccaggcaatcaggcagagctttccaagcaacttcctggggcaccctggggtgctgggtagaccaaggaatgggcaagggcccctgtgggaggctcagttgacatccacggatggcctgcacagcagggccgggaggaccagcactgacttgctatcctagaacatacacacagctacacctggattctcccctgaccaacagcccccgaccacccacaaccacttctttctacttccttttcctcagctgacttgagcagagggtgtgtgcacatatgcagcccacttccactccttcccctggggccacctgcacccaccctgccctcgtgcccacctccttctcagacactcccatctcagccccgtggagagtcctccctccaccttcctcaccaggacccagccggagcagtgaggtactggcctctttcccaacaccaccaggccctgcgcccccagacccatgcccctgttttgcgtttcttggcaggatttccctagagattatgacgttgcagccccgctgcgaggacgtagagacggccgagggggtagctttaactgtgacgggtgtcgcccaggtatagtaactcagcagccctgcgcatgtccgttgagctgcctggtcccgtactcgggttcggggggaggaggagaggacagcagccaggggcagtctctctccagcaccccagcccccgcaagtcccacaagagagggctagtcaggtcgtcgccactggaacatgctcaccgggccattttggccacccagcaggactaacagacaccccttctctcctcagcgggcccacgagggacagaaccagtgctgagggctcctggctcactaaccccacccccattctttgcaggtgttggaaatgtcaagccccagaatccaggccttccttgttccctgggtactgcgtgggaggggtggggcccagagggagaggccatgtgaggcagaggagctctggactctgggagtcggaggctgcatcatatcccctgctgagggcctaggtgagggcttcctgccccgatccacctcttggcttcacagggcagtgaggttcagccatgctgtaggcctcggcgaggggttggctgagtaactcaagaaggagaggcaccctcggttgcatcccccaaccctctcctgccctgtccaggctctttccttctctgtctgtgtccctattgctcattctgcttctcatactctctgcccctcagcctgagggtctcccacgtgtaggaagcctgcaagggaggaattagctggtgaggggacagtaggctggaggggtggggagacaagccccgaatgcccaggagaggccgtggcagggcctggggctgtcagtgcaggagaagtttcatagtgagagaagcccttgtgctgctgtctccccactagaggcttcagacagattccagccccccagggcctccaggtctgaaaaaaggaagggaggaggcacagccaccatcctgcctacctctgggtctggggcctttgtctgcctcrctccagcctagctgaagcgcctttgtcgtcactgrcaggtgaagatcatgacggagaaggaactcctggccgtggcttgtgagcagtttctgggtaagaatgtgcaggacatcaaaaacgtcgtcctgcagaccctggagggacatctgcgctccatcctcggtgaggccctgttcagcctttgaggagcctcacggggcccctaagccaaggcagggaggtgtgcagggctgggcagggggcctgtttcacaggagtttcaagctaaaacacttttcctcaaatatttaatttcaaaacttcaggtgacttgagttaaggagagggtatgagtgaaggggtgggatgggggctgtcggtctgctcaggaacctagtgctgcttgggacacttttcctcattcagcctggactgtgcagcaggaagctcggtgttaagtgctgttgagaagataccccaggaagacccagctcagagtgcagcaccccgcatgcacccctacctctacatgcatgcctcctcccttccccagctggctgggtccctggggagccagcccttgatccctctgcccccagggaccctgacagtggagcagatttatcaggaccgggaccagtttgccaagctggtgcgggaggtggcagcccctgatgttggccgcatgggcattgagatcctcagcttcaccatcaaggtacgacgtgatgggaagctgtatctcctggcgtccatctgggagatggtggctttgttagaggggcacctttgtgcctctggctgctcctttgagcctctgatacccccttccctccccaggacgtgtatgacaaagtggactatctgagctccctgggcaagacgcagactgccgtggtgcagagagatgctgacattggcgtggccgaggctgaacgggacgcaggcatccgggtatgtgggttcaaggatgggaagctcaggggtgatgggaccatgatgactcaggacctctactcactcaccttccccttctgccccttttgtccccaggaagctgaktgcaagaaggagatgctggatgtgaagttcatggcagacaccaagattgctgactctaagcgagccttcgagctgcaaaagtcagccttcagtgaggaggttaacatcaaggtgagcagcctgaggacatcctgggatggggctcagggatcaggacttggtgaccagcctctaatgtgccacacaccctcttgccacagacagctgaggcccagttggcctatgagctgcagggggcccgtgaacagcagaagatccggcaggaagagattgagattgaggttgtgcagcgcaagaaacagattgccgtggaggcacaggagatcctgcgtacggacaaggagctcatcgctacagtgcgccggcctgccgaggccgaggcccaccgcatccagcagattgccgagggtgaaaagtgagagccgcccaggtgccggggtcagggcttagtcaggctcctctgccttcagtgcactccctctactctcctgaccacagcttggaagccacttctccccctccactgtgtcttcttactcactgtgaagtgaggataaccccatgtcccctgtgggactgctgttgggaagactaaatagataaaggagkctccagtgcctggtgtagtgcttgggcatagacggcatcctggtttgtyccctcccacttacagatgggagccggtggcctttccctggccagagccggaaggtcaggccaccccactccgttccaatgtctcccaccccgacagcccccagagcagagggtttgaaggtttgctggcccccaggcaaggcttgagaggaccctggtacgtcccactgatcctaactggcctgggctcccccagggtgaagcaggtcctcttggcacaggcagaggctgagaagatccgcaaaatcggggaggcggaagcgrcagtcatcgaggcgatgggcraggcagaggctgagcggatgaagctcaaggcagaagcctaccagaaatacggggatgcagccaagatggccttggtgctagaggccctgccccaggtgaggcttccacccaagygggtcctagggttcaagtgtccttgcttgacaagctgggcaagtgccagaacttctctgggccttgcgagtaacacagggacagatggctagaagggttaaatgaggagcatcctcagcagggggcaggaaccctacaaaggcctaagccatccctggcccacagggcgtctcttaccatggctcgagactaagggccacccaggctgctytggggttggagtgagttaaggaagggagggagagatgctggaccgggctgagaacagagtcagcgccaaccaggctgtcctcccactcttacctcctagattgctgccaaaatcgctgccccacttaccaaggtcgatgagattgtggtcctcagtggagacaacagtaaggtcacatcagaagtgaaccgactgctggccgagctgcctgcctctgtgcatgccctcacaggcgtggacctgtctaaggtatgtgcctgcctagctgcrgtggggttgcccaggtagcccgtcggactggcccaggcaaagtggtcctgggctctggagccaaggtctcatggcatctcccatccttgcagatacccctgatcaagaaggccactggtgtgcaggtgtgaggctcctrcaggcccactctcttcagcagccacccggccctccctccagcacccgttttaatcccacagaacaacgggaacgttactgactctggtgccttatctcgaagggaccagaagtgctgygtgttcaggccatctctggctgtcttcctgtctctcctgtctgtccacctcctcctcttcctctcctttaccccactttcactgccactttcatcaggtttgtgtctcatctccctgcgtgtcttttcctttgtctgtctttttctttcccccatgcacatcatgtagattaagctgaagatgtttattacaatcactctctgtggggggtggccctgctgctcctcagaatcctggtgccttgaagttctctgtgcatctgtccatcctccctatggccctggccagagctcagcatgggcaggggttctgggtaggacggtcactgtcctytctcctggactggtcttcccagccctaaaccctgccccaggaagcccacagcctcacctgctgctgcccctctaggtmtgggcagccatgacctgcagggcccagagacactgtccttcccctcatccacccaaggccccagccagcgctcataccctgtcctttctccctgaccccaagggcacagaggcaaggcctcctgtctacagcagcttcctcagtttcctactgccttaggaggcccctgcttstgctcagggaaggcctcttcatgggcatgttcctgctggggcggtgcggtttggtcccaactctgctaagttttctgagatgagggtctagccctgttggggacagaaaagtgtgtagaccttcttcctgctagggctgcactgtcctgggtgttgggcccttctggtggacaaggctgtgccaaccctgtacagaatcgagtgctgtagcctggccagaccccagagcccttgtgccawctttyttcctggccagagtgatggggttccagccatggggaagcaacccaatcctctgtctccttgctccaatggaggcagaagagcccaggacccaagcrtcttggcaggggtgctgtgaatgtccagtggtcccagctccccaccctggccctgccccagcctgtgtagctcttcctgcatgtggatgctgcatgtytggtytggggcttggatgttgcactgccccactgcctgtcccttctggtaaaataaagaactcttaatgcccacccctgcattgtgtcttctgtgaggagagagactgcgaaccgagaaccaaccaggtcccctacctctcttcagcttcaaggcagcttttagcctgttcttccgcattctagccactggggagcaacagcacactggccttgcccccagttgcgccttggacatgactgattggctaagatgcttaggccaaaccccagccctggaacacctggctccatcacaggcagaaggtggaggggactagcagggtgcagttgcacatgcctgtagtcccagctactcaggaggctgaggtgagagaattgcttgagcccaggagtttgagtccagcctgggcaacataggaagactccatctcttaaaaaaaaaaaagaagaaaaggtggaggaaactgccaggttcactgcacctctgtaccggtatactgagccctactcagtaatggagcccatctctcaggcttaagagcttagactctgaagtaaggcaatgtaggtttagattttagctttattgttcattacctgtgtaatcttaggtgagtaacttcatctttctgggcctcaatattcttattcatttaatgaatttatcaaatgcttgcaatgtactaagcattgtcttagatgccagagcaatgagtcaacaaaataaatgcacagccattcaagcttacattcagatagaaacaagaaaaattaaacgtacagtttatgttagataatggtaagtcataaggaaaagaagtcaaagaaattataggaagtgtgggagtccgctgaaattttagggtatccaaaaaaggcctcattaagaaggtagccctgaagaaagtaaaggattgagccattcagatatctgaaggaagagttttccatccaaaggccctgaggcaggagagtgtctggcatgatgaaagaatagcaaggtcaggatgtttggagcaagggagtaagtcagggtatcaggagatgagtcaggatctcatctttccagatcatgtagaaccttaatgaggcatattgtggtctttactctgaggtgggaaaccactgaaaggctttgaaaaaggagtgatatcatttgatacaccttaaaaggtatttctaggcaccaagacaattcaaggcagaaaggaacagatggtgctagaacaactgggtctgtattggggaaaaaaattgaattgcagctgagcgtggtggttcatgcctgtaatccaagcactttgggaggcctagttgggtggaccacaaggtcaggagttcaagaccagcctggccaagatggtgaaaccctgtctctattaaaaactacaaaaatgggctgggcacagtggctcacgcctgtaatcctggcgctttgggaggccgaggcgtgcagatcacgaggtcaggagatcgagaccatcctggctaatgcagtgaaaccctgtctctactaaaaatacaaaaaattagccaggcatggtggcaggcgcctgtagtcccagctacttgggaggctgaggcaggagaatggcatgaacccaggaggcagagcttgcagtgagccgagatccgcaccactgcactccagcctaggtgacagagcaagactccgtctcaaaaaaataaaactacaaaaattagccaggtgcagtgtcaggcacctgtaatcccagctactcgggaggctgaggcagaagaatcacttgaacccaggcagcagaggttgcagtgagccgagatcatgccactgcacacagagtgagactctgtctcaaaaaaaaaagaaaaaaacaattgaattgcaaccccctacctcacaccatatacccaaatctagtttggggtggatcacagacctaatgtaaaaactcaaaacataaagttcatagagcaagcagggaatgtttctatgaccttgacataggcaagatttcttaagaccaaaaaaaaaaaaactactaaccataaaagaaaaatttgatatattgcatcatcacaataggtcttggccagccaggcatggtggcttatgcctgcaatctcagcactttgggaggccgaggcgggtggatcacctgaggtcaggagtttgagaccagcctgaccaatatggtgaaaccctgtcgctactaaaacaacaaaaattagccaggcgtggtggcaggctcctgtaatcccagctactcaggaggctgaggcagggagaattgcttgaacccaggaggcggaggttgcagtaagctgagatcgcgccactctactccagcctcagcaacagagcaaaactccatctcaaaaaaaaaattaactgagcatggtggtttgtgcctatagtcccagctacttgggtggctgaggtgggaggatcgtgtgagcctaggagatggaggctgcagtgaactatgatcacataactgtaccccagcctaggcgacagagaccctgtctcaaaaaaaaaaaaaaaaagaatgagaagacaagcctcagaataatgggaaaaaatatttgcaagatatatgtctggcaaaaaaaaaaaaaaaaaactagcattcagaatatattttaccaatcagtatgggaagaaatggtaatgccgcagaaaaatagacaaaggaatggccaatagatgtatgaaatctgtgtgacagattgtattttccacagatagtggcaacaatatcttccatcctacatgttcctcttacagtgtcactttgaccatccttacaattagaggtagagcctattcttccttcccttgaaactggtgggacttttgtggctattcaggccaataaagagtattgcagaagtgacattatgtgacttctgagtttagatcacaaacgatgacaaagcctgtgctttatttgctggaatactctctctttaagcctttagccaccatgtaagcagtatgactgttctgagggcactgtactgtaaggaagcccaaacagagggaccacagggttgggccctggctacatgaagagaaagagatagacacctgcagctgctccagccaccatctggctgcatgtgcaggagagaccccaagccatttctgcccagccaacctcctaaaatccagactcctgaaactgtgtgagatagtaaatggactgctcattgtttaagcttctaagttggaggttgatttgttacatagtaaagaatggcaggaatagcatgcataacttcattagtcatcagggaaatgcaaattaaaaccaaaatgagattatcacttcacacctaccagaatgactgaaatgaaaaaaaaagttacaatatcaagcatgggtgaggaggaagagcaattggaacattcatacactgctggtagaaatatatgtcaatacaaccactttggaaacctgtttgacagaatctactacagctgaacaaaagcataccctttgacccaaccatctcactccaacagcaatatacatacatatgggtacaagaatactcacagcagcattatgaataatggcccccaaattcaaacaactcaaatgttcatcaatggtagaatgaaaaatgtgtatcatattcatgaaattgaatactatgcagtaataaaaacaaatgaactactgctacatgcaaatacttgaataaatcttgcaaacgtaatgttgagtgaaagaagccagacatgggctgggtgcggtggttcacacctgtaatcccagcactttgagaggatgaggtgggcagattgcttgagtgtgtggcaaaaccctgtctccacaaaagatacaaaaaaaaaaaattaactgggcatggtggtttgcacctatagtcccagctactcgggaggctggggtgggaggattgcttcagcccgggacgttgagttgaggctgcagtgagtcaagattgcaccattgcactccagcctgggagacacagtgagaccctgtcccaaaaataataatagacgggtatggtggctcacgcctgtaatcccagcactttgggaggctgaggcgggtggactgcctgaggtcaggagttcgagaccagccaggccaacatatagtgaaaccccgtctctactaaaaatacaaaaattacctgggcgtggtggcgcacatctgtagtcccagctacttgggaaactgaggcaggagaattgcttgaacccgggaggcaaaggttgcagtgagccgagatcacaccattgcactccagcctgggcaacagagcgagactccatctcaaaaaataataataataataatatagattgtatcattccatataaagtccaaaaagcaggcaaagctaatctatgacattagatcagctaaaggtcacctttggggaagaagagacagaaatagagggcacaggagccccctgagaatgtcctgtttcttgacctggatggtgattacatgggtgtgttcactttgtgataattcacttatgagtcatgcactttttgaatatatgttctacttcagcaaaaagttaattaagaaaataaattgcgggcaagccgctaggtccccttccacactgtggaagctttgttctttcactctgcaataaatcttgctgctgctcactctttgggtccgcactgcctttatgagctgtaacaatcactgcgaaggtctgcagcttcactcctgaggccagcaagaccacgaacccaccgggaggaatgaacaactccggacgggaggaaccaataactccagacgtgccgccctaagagctgtaacacttactgcgaaggtctgcagcttcactcttgaagccagccagaccatgaacccaccagaaggaagaaactccgaacacgtccaaacatcagaaggaacaaactccggacacaccatctttaagaactgtaacactcactgcgagggtctgcagcttcattcttgaagtcaatgagaccaagaacccaccaattctggacacaccatgttcatgccactgcattttgccctgggtgactgcattttgccctgggtgacagagcaagaccctgtctcaaaaaacaaaacaaaaaaaattgtgattaatacatagaaaatagggaattgagtggttgcttttaaattggaagtataacttacatagcgaaaggggtacaaatcttgtgaattttacatataataaaatttcataaatgcatatacctttctaaccagcgtgaagatcaaaatctggaacatgtccaaaaaaagaaaataaattgcctccaagatcttcgtcccatctggaagaacggaagaacggagttgttatttactgaaatgggaaaaacatttgagggagcagactttttttttttcaagatagagagatagtctctctctgtcgcctaggctggaatgcagtggcaccatcacgacttactgcagctttgacttccctaagctcaagtgaacctcctacctcagcctcctgagtagctgggactacagacatgcaccaccatacctggctaatttttgtttgtttgtttgttttttgagatggagtcccgctctgctgggctggagtgcagtggcactatctcggctcactgcaacctccacctcccaggttcaagcgattcttctgcctcagcctcccaagtagctgagactacaatcgcataccaccgcctggctaatttttgtatttttagtagagatggggtttcaccatgttgcccaggctggtctcgaactcctgaggctcaagcaatccacctgcctcagcctcccaaagtgctgggattacaggcatgagccaccatgcctggcccactactggtcttttcactgcttcctgttgaccttcaggaaaaggaggcctgagtggctgcaatgagacccaactaggagatggtccaggttggccttagtgtcagggacactgacttcagcaagaagatgagaggggccttgctgaaagagatctgaagggtgctggagaggaggaaggggcaatgatgtgggggtagggagtgaggaggggatgcctcagcacctgtact

SEQ ID NO: 94461 - DNA, 15665 bp, Homo sapiens
tttggctctgtgaccccacccaaatctcatcttgaattgtaactctcacaattcccatgtgttgtgggaggaatctggtgacaggtgattgaattatgggggcagatctttcctctgctgttcttgtgatagtgcatgattctcacaagatctgatttaaaacaaacaaacaaacaaacaaacaggagtttgcctacacaagctctctttccctgctgccatgcatgagacttgctcctccttgccttccaccatcattgtgaggcgtctccagtcatgtggaactgttgagttgtccattaaacctctttcctttttaaactgcccagtcttgggtatgtctttgtcagcagtatgaaaacagactaatatacattaaattggtaccagtagagtgaagcactgctgaaaagacacctgaaaatgcggaagcaactttagacctgtgtaacaggcagaggttggaaaggtttggagggctcagaagaagatgggaaaacgtgggaaagtttggaactttctagagactggttgaatggctttgaccaaaagcctgactgtgatatgggcaataaggtctaggctgaggtggtcccatttggagattaggaacttgttgggaactgtagcaaaggtgactcttgctatgttttagtgaagagactggcagcattttgcccctgccctacaaatttgtggaactttgaacttgagagagatgatttagggtatctggcggaaggaatttctaagcagcgaagcattcaaggggtgacttgggtgctgttaaaggcattcagtgttaaaagaggagtagagtataaaagtttggaaaatttgcagcctgacaatgtgatagaaaagtaaaacccattttctgaggagaaatacaatccagttgcagaaatttgcataagtaacgaggagcccgatgttaatcaccaagacaatggggaaatctctccagggcatatcagaggtcttcatggcagcttctctccatcacagaccaagaggcctaggagaaaatggtctcatgggccaggcccaggatccctgtgctgtgtgcagactagggacttagtgccctgtgtcccagttgctccagtcatggctgaaaggggccaatgtagagctcaggctgtggcttagagggtacaagccccaaggcttggtaacttccatgtggttttgagcctgcaggtgcaccaaagtcaagaattgcggtttgagaacatctgcctagatttcagaagatgtatggaaatgtctggatgcctaggcagaagttttttgcaggagtagggtgctcatggagaacctctgctagagcagtgcagaagggaaatgtggggttggagcccccacacagagtccctactggggcaccaactagtggaactgtgagaagaggccaccatcctccagaccccagaatgatagatacactgagagcttgcactgttcacctggaaaagccacagacaatgcaagcccatgaaagcagccaggagggaggctgtaccctgcaaagccacaggggtggagctacccaagaccactggaacccagctcttgcatcagcatgacctggatatgagacatggaatgaatggagatcattttggagctttaagatctgactgccctgctggagtttggacttggatggggcctgtggcccctttgttttggccaatttctcccattttgaatggctgtatttacccatcacctgtacccccattgtatctaggaagtaactaacttgcatttgatttcgcaggctcataggccaaagggacttgtcttgtctcacatgagacgttagactgtggacttttgagttaatgctgaaatgagttaagacgttgggaaggcatgatattggttttgaaatgtgaggacatgagattttggagtggccaagggtggaatgttatggtttggctttgtgtccccacacaaatctcatcttgaattgtaactcccacaattcccatgtgtcttgggaggaacctggtgggaggtgattgaattatgggagcaggtctttcctgtgctgttcttgtggtagtgaatgagtctcatgagatctgatgatttaaaaaaaaaaaaaatgggagtttgtctgcacaagctctctttgcctgccgccatccgtgtaatatgcaactttctcctccttgacttctcctccttgacttctgccatgatagtgaggcttccctagccatgtggaactgtgacttttccattaagcctctttctttgtaaattgcccagtctcgggtatgtctttttcagcagagtgaaaacagatgaatatagccactatgtagggttgcagagaaaatataagacttccagttatgtttgaattccagatacacaatgcacttttaaaaatgtaggtatttctcccaagtaataggtgtattttcatttgtttattctggcaaccatagattagagcacaatgagtaacaggaaatggaataatagaaaagagaaggcaataactgggtctcagaaagtcttggaaaattatgttattattattttttcaatgtgtaagaaattaggaggtgattcaaggcctttaagcaaagactaatctaatttctattttaaaaataataattttgtttgtagagtggaaataaagaaatccagtgttaaaaactctgagtaaaaatggaagaataaacatataatagtaaattttgatttatttataaaattcagaaaattatgaaaaactgtagaggagataacaagcaacaaaattttaaaaactgggaagcagttgaaaaagtgaaaactgactaaccaaaaagaagaatgctgaatcctaaagcagtagtttagataggttaggaattgaacagattcatacgacagtttctcagggtctcaggaatcaggctttctaggttccatggaagtaggaataaaggaggagaacctaaatataccttcccataagagaagaaggatagaagtttatatattctggagaaataaacccaaaatctctgtacaaaaaaaaaattcatgcacagttgcaaatatgaatggaggtggtaaagtctatacaaaaaagaaagtagtaaaactaatgaaagcagattagatattgaaaatctcagctttttttttttcaacttgggttttagtattctgttaggctgcttctagctaagcactgagcatgggaaattgtccttgggcaatatgataagacccaaagtaaggacctaaaaatagtgctgtgggatgacccaacagtatggtgcagatttctctactgaacctacattgacaaagtctaacctgtacgctctcagactttcctttcaattttaatctccattagcagtaaataaagaaatatcaggtatccgaggaaaatctctttacttaaaaaaagtccaaaacaaagaaatttaaaaagcaaactgaagaaaataaaactgtgtagaaaaaaataaaacaatgaaagctatgataaagaacttgagagataaaaagatggagaaacatgaaacaggaagaagatactactaaagaaaaagattaagatgaatattcagaatacaaaaacaaaaagttgtagtgtcattaaaaataaaaacatagaagaaataaaaaacaaaatactaggcttgaaagttagaatagggtatatatttcagatagtagagcaaaaatacaaagtgggactatattccagacaatagagcaaaaacgtgaaattcagagagaacataagaaaatttgatgatgggcccacaagagccaatatctaaataacaggcattttagctagagagaataggagacatggaggaaggaaaccattaatcgaagaatttaaggggattccaaagacagagaaacataaatttacagattaaaaaggtccaccacatgcccccaaagtaccacagcatgaaattttagagggccaaaattaagaaccaacaaacttgcagaaagaaatagaaagcaatagcagacaatggtacattgccttctaatcctaaaagacaaccgttttcaacctagaatactatagtcagacactggcaataaattgctaaggtagaacccaaaatactgtgacatgcaagttacaaaaactcatgtcctagatgaagttcctaaagaggctgctgcaggagatacactactaaaacaaagaaatgaaccatggaattgttcattataaatagaaagttatggaatatagaaaacaagacaaaaagagaaaagtgaaagaaatgcccaggagggcttagaagggagaagcaagccagtcatggaagtcaaccagaccagaacaagtcaataggctgtgggagaggtttttcaaaatgcagaaactgaaagaatatctgatgtatccgacaactggacatttagacaactggcaaagaatttgtgataaatgcaaaagtaagcatactaaaagaaaaaattctagacaattagagaaaatctagggaatacaaaatgtgcagaaaattaatgttccattctgaatcaagaaataacaatgttatttatttgtggagctgtagaggtaaatgccaaaatgattaacttaactaatagaattgaaaatggttaacttggagctggaagatgagaatgtcagtgtactctgggtgtgtagcaagccttgaacaaaccttgtagaactatttgactttttaatccatgtagaattcatgcatgcatgtagaactctgataaaaaaataataaaatacatttaaaaaccaacctatggatatttaaatcatccagayaagaaatcctaataacttggactaaggtaatgagagcagagatagtggagaatgcatggatttgatatagaggatgaggaataatgagttgtttgttaagggtagcttttaggtttgttcatgagcaacaatgaaataaataacattagagtaagaaaaacagaaagaagtatatgagttttctttcataaatgcttagctagaaataacatggataaattgagtaataactctgtaaaacattctgaaacttaaaggaaaatctaggctggcaaaaaaagcagaagtcctgagcactgatgtaactcattaattatgacatcagcatttggaatgatgcacatgtagagtcaatagaaaaaaatagcaaatcaacagtctttccattagctgcttacaaatatatgtatagtctccttccattctgtcccttccatgcacattcttcctcctctttctaaacctttggcctcttctccagggtctagttgtttatggtcctcaaagtcataaaaatggtaattcttggcaactcatgatacaatcttactgtccacgctacaagaggacattccagtgtttaaacttcagcttggagagtaagtcaatagcatttactcatcaccttgatgaccttgatgcattatgggtttaataaaggatattttcggccgggcgtggtggctcaygcctgtaatcccagcactttgggaggccagggcgggcagatcacgaagtcaggagatcgagaccatcctggctaacactgtgaaaccccgtctctactaaaaatacaaaaaaaaaaaaaaaaaaaaaaattagctgggcgtggtggcgggcgcctgtagttccagctactcgggaggctgaggcagaagaatgatgctaacccgggaggcggagcttgcagtgagccggcatggtgccactgcactccagcctgggcgacacggggagactccatctcaaaataaataaataaataaataaataaataaataaataaaaagtatattttcccttctactcaattatactagactcccttcccaccactagcaagaatataaagaaaaatacttgtgggatgggataatggggactacctttctgttaaatgacactaaaggctgcaagttaacctagggtgaaaatttacattaagaacaaaagaggggagccagcctcgggaaggaagcgcctgtcgcgagcgcgagcttctgagctcgatgggccgagctggcagctggttggtgcttacaccttggccgcagcggcaggtccctccacgtgctttcggcggcgacctggagctggakgagtcggggatccgagaggaatgtggcgtgttccggtgcatcgcctcaggagagtggcccacgcagctggatgtgccgcatgtgatcactctgggacgccgcagcgccggggtcaggagagtgctggtaytctgactagtgacgggagttcsgcgccaacattcaaatcacacaagggaatgggtcttgtaaatcacgtctttactgaagacaatttgaaaaaatgacatgtttcaaatcttggaattggacacacaaggtatgccaccacaggaaaatgtgaactagaaaattgtcagccctttgttgctgaaacactttatgggaagatagctgtggcacataatggccaattggcaaatgctgctcgattaaggaaaaagcttctgcgtcatggtattgatctgtccacaagttctgatagtgaagtgattacccagttactggcgtatacccctcctcaggaacaagatgacaccccagactgggtagccaggattaaaaacttgatgaaggaaacacccacagcatactccctgcttaaaatgcccagagaygttatttacgcagtatgagatcattatggaaatcgtcccttatgcrttgatcgtcttattccagcgtctgatataaatgacaaagagaaaaaaacatcggaaacagaaggacgggtggtgtcttcagaatcttgtagcttcttatctattggtgcaagatattaccrtgaagtcttgcctggagaaattgtggaaatatccagacgtaatgtccgaactcttgatattatatcaaggtctgaaggaaaccctatggctttttgtatctttgaatatgtttattttgcaagaccagacagtatgtttgaagaccaaatggtttatacaataarataccgtcgtggccagcagctagctattgaagcacctatggatgcagatttggttagctctgttccagaatctgctacgcctgctgctcttgctyatgcagggaagtgtggacttccatatgtggaggtgctgtgtaaaacctgatatgtagggagaaccttcattcagccaaacatgaggttaagacaacttggtgttgcaaaaaaatttggagtattgtcagacaactttaaaggcaaaagaattgttcttgtagatgactcaattgtgagaggcaataccatctcaactatcataaaattgctcaaagaatctggtgcaaaagaggaacacattccagtagcttcaccaccaattaaatatccatgcttcatgggaataaacattcctacaaaagaagagctcattgccaataaaccagaatttgatcaccttgcagaatatctaggagcaaacagtgttgtgtatctgtcagtagaaggactggtttcatctgtgcaagaagggatacagtttaaaaaacagaaagagaaaaagcaygatattatgatcyaagaaaatggaaatggtctggaatgttttgaaaagagtggtcattgtacagcttgtctcactggaaaatatcctgtagaattagaatggtagctggtagggttggatgtgtgtagtttcaagatrgaaaggtggtcaagaagttatagtggtcacacctcatctatttactgttactcagttggtacaatgtaaaatgccatgcttatgtttacctttataagttttgagattttttttttctgaaaaggataccaaagtgggataaccaaccgaacatttctaattgcatataatacaacaatatgtggtgttcttttttttacacaagcattggctagcctttttaacctggtcagagaaggcaggtggtcactgacatttgccatgtccatgctttaaagggtttgcaagaagttagggttaaggagaggtgatgccaacaagacaggtgagttaaatgtaacatttcacacaaagtttgaatagaatacattatacctcataggtgtctagcttgtaaagttctggctgtagttatgaccttggcttccctgtctaactgtagacaaatctttaaaaacaaaaaacacaaaatataatctgtggtgcctcagtttccccacatgtgcaatgggatacttattagactaaataattaataagaatgtgaataagtgtcatacttttgtgatttgagtcatcatttcacttctgattttaagacagctcatgattgttagctttcggaaagctaatgattattaactttttgaaattagtttacaattaagatttcattatgatggaaggagatataattggcagatctttgccatctctctttgagatgtcctaaaaagggttgtaaaaatctgtgaaaaagtttttcctacatttgattagaaaatgtgatccacagtatttagcgccctgatactataagctcagcaagtaacctrgtacgtttgaaataaaaaccaaatttttagaataaaacaatccctttatccttaatttaattaattatcatatagttttttaatgaagggcttgatcacttgcaagcatatatacatgtagatgtacatatacatgtacacatacacataaatattattgcaattaagtgatcaagtacagacacaataggggccagttttgtttaaggatcaaagagtcaaccactttggggagttagtatcaacttataatccaagtccaagtatcatcttataatcgcttttttctactttattaagatctaatgaatttgatttcttttttgaagttttttcttgtaacatctgagatttagaagtttaagatgaccccaaacctttatgtaagaatttttaaacataaaagtgtttgtttctgttatgttaccataatttgatgtatatagtgtccagatccatttagaaatttaatattaataactgaaactgcttgtcttcctttggtatatagtctcacatattatattatagcagaccaagataaaattttgaaagctctttaagcccacatgcagcagtgggtcagacaaccctgtggcagtgacacgggcaaattggcatttgaataaagccctgggaccacttcaacatgtgtagcctcttgtcttaaatgtattccccatggcagcatggaggaggtaagacctgtgggtcaattttgaactggacttactttgatttttaaaacaagaaactcagggaaagtactaaaccaaaatctctgattttactttgcgttttctgtagtttttgttttactgagatgcttttgtaaaggaaaataatactgtgacagttcagtaattctacagatttcttaatatttctccatcatggccttttacttcacaattttctgaagtctgaattcaatttttttttaccaatttaatctcaaatgttgtttaactgctttaaatttatatacgtagagtattataaactgcagagatgaaaaatgtgttttcaagggatttatattgtgaactgaagtaagcctactttttgtgacttatttgtgatgtcttgttgataaatatgtgtaataagtatgtttaaaaaaaagaacaaaagaggttataaaaacaaggcctataaaactacatttaaattttggatagaggagaagcagaaaaattgtgaaatagtggccaaagaaagagagaaggaatgctgtgaagatttagtgttactgaagccaaagtaagagagagtttctaaatggagaaatcaactatttggaaagtgatgggaggctgtttgtaaagtgaatcactaagaagggaagttagatttggcaaaattgtgttagttgatcattttatgacacaggttaattggaataatacaagcattggtgagctcgtagcattgttttgatggtatctctgtcttctcttctcgctctctctttagacattttgaagtcttgcataataattagtcaaggctcagcatatccaggggtcatagttagtattgagtttaaaatcaaacgtattaacccctacatttgagttttccccttttgtaattgaagataaatagcttaaactgtgtcttctttttaaacatacagacatatagacacacaaactggatggccagtaactgaataaaatattttttaaataaacgaaaagctgtgtttttctatatttaaccaaataagtttgcttcatttacatcttgctaatgaaatgcttgctttgctgtgtggcactaactataacacagaaaatacaattttagagcaatatattttggtataagaaacaaaatcgaacattacttaaaatcatagtatcttactatttattaagcccttactgaatgtccattaattactcttattaagcccttactatttattaagcccttacttaatgtccattaattgtgaaaacacgtaaggccaaaaatctatcctgaattcagaagacccttgactttcaattgtctaattgtatatgtatagtaatcctacaagtacaaaataaaaacttattgatgaatagaattgtagggaaatttagtggaattgtttttgaatttggaaaggctattaataacattttttgtttttaaactgacaatggcaaactcattcctgttagggcctggaaacattcaggtcacattgctttcggaatgatttgagttctttctatttgaatagtcttggtgtgagttagaagtctttagtttccttctgtgtactttagagggatgcttagcaaccttgtggttgtaatatttctgaatctcttggatcactttcagtaaatatcagttcaaacaacactggacttgagaaggttgatttacatatttgcctttagaatgagactaacacactcctttctgggctcaggaaagtcgtctgaactccttctctctcttccctaccatatttcctctggcaaactctgggatcctggggcaaagataagcagccctaaagtgtcattctttcatatcctaaactttttcaacggccttgtatactattctatttggagcctccctggagatgttttatccagtcctttcagttaattcagaagggccaagaagcctatgcagggtcctcacttgaccactgccaattcaggctttaccatttcagcataaactgaacaaaatggccttagaaaagagagagagagagagagatacgaccaaaattgtgtttctgaccaaaaacatggagagtgggtaattttcttacttacagagtatatggaaaaagacaaagttataatgaggttaggccagctatagtcattgtgctgatgcttctagatctttatttacatctgcactaaagggaagggatggtaatagagcagcagaagcaacatgagataatctaaagaatataaaatcagcccagatcttccacaactttggtgtgcccttggataaatcacttcactggtatgagttttcttcatcaataaaatgagaaggtcctactaaatcgctccagccaatccattcagcttttatattcaaatattcatttaagtcttagaagtaagctctgaatatctgtttggtgagaatatttctcataataattatgatggctcatctatgtaagcttaaaaatatagattttcaaaaactatggtgtttcaatacagcattatactcttgatctcaaatatttcctaattgaatgtctgtatagataggcagcaagataggatatttgattttaccttcttgaatataatagtttcaattacttgaagcatatctaatattaaaggacacttacttgccacccccacatcaccatgtcattcatctttctggcaaatgtcaatgaattttaatagtaggaggtaaagaaagatagtcttttttttttaaatgttaagggtttaggatgaaacaaataaatgtttaagtaaaaaatgcattttttaactgtggcaactatatatgcgaagcataggaaattttttttagtgaaacacagaatggatgaatttctcatttgcaatatgctaatgttatgtaagacacatccaaatagttatctagcaaaaatgtgtacgctgtgatttttgtaagtttaaattaacaaaatgcattaaattggtttcataaaatctatccagatatgtatatgttcagcctgcatattaatgcagcattctttcttcaggcacgtaaaaagatgatgggctgtagctattgaaatgtgttacatttgctccataacattctctgctaaaatgctgttgtcttgagagctctcatgctgtgttgttaataacagtaggatcttaaatgaagccattacctccrctctataaatcacaattgtttttaatcaaagaacattaaaatgagctagttgccactgagggattattcagtttaaaagaagcaactttacacagatttagaagaaacatacgtaggcactttaaggactcattgctttttgtaggtaaagatttggatcataagtcatgttggagaaaagtaactctacgattcaacatttatagaagaggagagtacacaatctggggcaaaatataagtcctaccactgcacttctaccatgagcctgtgctttacaaagtcctgttctgtagcccagaatcctgggagcacatgtgaaataagagttctggggacagaaataatattgccacattactaaccctacctttggagatttgcagtagttgttaaacttttcaactaccttttttagaaaagataaactcatgttccataaactctaatatgatagtaattgtatgtttaatgtccattaattgtgaaaacacgtaaggccaaaaatctatcctgaattcagaaactctttaaaaaggtatcttaaatcaaaatagcatttacacactcaaatattataaaatacatgagatctatgtgtgacaaatagtttatctgtaggcatttcctggtgcatttatggatttgcaggtatcagggatgcatagccctcaggttccttaagccagtaattcccatgctttctacatggtaatagatacaatggatgagttcctatttgctctatgctatgtaacattagacatatcaaatatgttttagatgattcattctagaagtggttaatgattacatcaatgataaaaatagctatttaaatacttcactaatattgcgggctacacacaatttttagatgagtagctgtaattctatcccttttccctggctgaagaaagcttctaataatgcagcataatgaagctggtgtattctttagcatctttaatttgctgtaattttagggattaatcatacattttgtctttttttaattttgaaacacaacttgaaatatttcacaaatgtagctatattcaatttaaaaaccactaataaataacaggtttgcttttgatgttatagatatctacacattcagctgcatggaacctgggccaagttgcaccccatatttcctacgatagccctgaatctgatgaaattctcttaagcaaaatgtagatgattctttctaactacatggataaaattctaatattcagctaagatgcaaaagattcagttacatctgattgccctaagttaaacacattggcacgaactgcaaagatatgctcattgatcagctattgctcagagggcatttaggaaaagacatatgctcatggagtgccagttcaattctcagcatgctgccataattacatgcttcagtgtgtgcgcttaatgacaagaagaagaaaaccagaactgcctcagagaacacaagggtactggctcaacaatccccactttcttaggtgctaaagttttgatccttttcagaagaaaatggtgcctttcaaaaagatgttctcataaatgaaatccctctgtcatatcttacaatagtctttattggttaaaagtccatatctatttattttcataacatatttcagcaagttatttgcctacttaatttagggcctcaggattctatgtttacaggtgactggataatatcatcttctgcatgggatcaataatgatgaggccatcaaaggaaaggggtgaagattaaactgtgagatatgtagagtctgtcactggtaacacagtccctcccatcaattcccagtgtttgactgcttaacatgttatggaaatgttattactcatagaaattcgggttttctaagccttgaggtcatctatcttttgtttcatgaatgatctttgtgaaacaagagaaattcatcctcttttttgacattgaggtaaatttactgtcaagctccttacagcctagcttcagatcccatctcttgcatgcctccttttgaagtcttatacctaattttcatccataattgtgcagtgttgtttactgtaaggagaatggcaggatctacaaaacccaaatcagaccccactcatacagtttagtatggcagctgtcccaaagatgctgcccttgaacagcgccaaagccttaagataaaaagttgcaattatcaagactgaatttcaggtacgtggcaatgagtagcaaaaaacctttcctctgtctgaaatcaagttttcctgccactatatattgatatttcagtggaagtaatttgcatgggagtcttctgagtttctcgtattttctgtggcatgtccagacttcttatatttgcacaaaattggcaaacagcaacaatagcaatggtgacaaaaataattagaccagggtgtccaagggagataatacggtcatgagttctgtttctgattgggccagtaaagcccctttctcatccctcttttccacttatcactagagatagaaactaaaaacaatggcttcaggctgctaaaagcctaaaacaaaacaaaacagaacaacaacaacaaaataaggcaggttagacctcattgaccactgaatgaatgccaggatctttgctaaattgtggcttccactgcaaaatttaagtaaacttactgaagatgttatccaaagtcagatataaatcagaatgtaaagaagaattcaggtttggaaggtagctttcaagtttagaaaaatgtaaaaatacagattttttttaatattgaaaaaatagtcaatattgtgaggcaaatgaaaaaataacattttaaataacgaaaatattatattttaattccctacatttcacaaaaagagcaacaagacctttaaattggaagtcatcttgggccaccattttcagtttctcatccactgcaaaaatcctccttaccatcttaacagaaagcctattttacttcacttacattgctgtgaatgtcattgttttcagccacagtcggccttagtgccaaatgctactttgcgtcccatttttgtatgacttgcaaactaagaatagattttacatttttaaatggtttttaaaaattaacaaaagtagagtacgtcataatacatgacaatcatatgaaactcattttttagtttctataaataaagttttattggggcacagccatggttattatttatgtattggtgatggctgctttcatg

SEQ ID NO: 94462 - DNA, 19062 bp, Homo sapiens
aagagcttctgcacagcaaaataaactatcatcagagtgaacaggcaacctacaaaatgagaaaaaatttttacaatctacccatctgacaaagggctgatatccagaatctacaaagaacttaaacaaatttacaagaaagaaacgaacaaccccaccaaaaagtgggtgaaggatatgaacagacacttctcaaaagaagacatttatgcagccaacagacacatgaaaaaatgctcatcatcactggtcatcagagaaatgcaaatcaaatcctcaatgagataccatatcacgccagttagaatggcgatcattcaaaagtcaggaaacaacagatgctggagaggatgtggagaaataggaacacttttacactgttggtaggagtgtaaattagttcacccattgtggaagacagtgtggcaatttctcaggatctagaactagaaataccatttgacacagccatcccgttactgggtatataactaaaggattataataaatcatgctactataaagacacgtgcacacgtatgtttactgcggcactgttcacaatagcaaagacttggaaccaacccgaacgtccatcagtgatagactagattaagaaaatgtggcacatatacaccatggaatactatgcagccattataaagaatgagttcatgtccttttcagggacgtggatgaagctggaaaccatgattctcagcaaactatcacaaacacagaaaaccaaacaccccatgttctcacccataggtgggaattgaacaatgagaacacatggacccagggcagggaacatcacacaccagggcctgtcggtgggtggagggctgggggagggatagcattaggagaaatatctaatataaatgatgagttgatgggtgcaccaaaccaacatggcacatgtatacgtatgtaacaagcctgcacgttgtgcacacgtaccctagaacttaaagtataagaatgaaaaaagaatcaatgtatgattctttaatccatcatctgagcatccatcttataagggatcacattgtttttctccatatagtaagagtttttccaacaagaacagcaactctttcccactgacttgtgatgcaccttttatcatagatgaaatttccctctaaccagggatctcccctctccatgctgagttgtctgttggttcactgtcaccatactgcttaagacaacaacagcacctttagagtgtacctgagtatctggaagagcttcctgcctaccctcctttggcttaggcatctgtggacctttatccctcctcgcatgattcagagtgagtttctaaaactggaatctttactgggactacagtgaagtgatggatgaattgagggagaactgacatctccatatatcaggccacccctcccaggagcaggagatgactttacctggggagtatctacacccccattctactcccacctaccaattagtcggcaattgatggagttgctcaatcaatgctagggagcagatctccagggaggaagacagagtgggcctggaatattcttcagcatcactgcttccattcccagccacgcctggcaagagggaggaaacatcctgtcacagaacctatgttttctgggtggacgaaaccaggtgtcctggaggaagcaggtatggtgggaagttggggcaaggggcaaggggacacagagcaacagaacttctggctttccctagcatgggccaaccctcccggccagcatcatgaggcggcactggctgcttcccccttgtcccggggattgggaggattgttgtgcttcattcagcctgtctacctcatgacttgactgagctacacctcaacattgtcaagtaagtagacagattatcatccccattcaagagaagaggagaagtcatctcctgctaaggtccacagagaaggaagttcactcattacctgaaaaacatttatccagacctcacagtgcagcagcttcttggccctgggatgtggcagagaccagacaaatggtcaaatggatccagtcagcattagacaccatggtggacatgttgttcatgtcagccagcaccattccctgagaaaaccaaccccgtgcactccgtttctcctaggctggtcaatcatggtgccccctcaccaaagacaggaaagggggcaatggtgtgggtccagtcactacatcaggacatgccacaccccctagccacagggattggtcaagagggtatgaggacgatccttgcagtaccggagtcttccctggggtttcatgtgtatgttgagggacagaagtttcttcctactaaggttgatgaggagggtggatataagtcttgggcggttggcagtcaggtttttatagaaaagagccttcaggaagaacaaaaccaagcagagacaagcagtatggacacatgagagagaaccggaggcctgacaatgttgctttagcacttaggtccagccatgcctagagttaacacattcatactttctcgttatgtgagccaacccatgagcttttggcttatgcatacttgagttggaataagtggaaacaaagagtaccactggacagagcccctaccaacaaatccaactctctgcccactctacggaactttcccctcaggttccaccacactctttcaggttggggcttattttgatcataattcccctgttctcaaattgtctttgaatccagattctgtcagtaagtaccctttattccttattggtttatgacatctgctagaaggccaagcctgccttctgtgtcatcccccaagttggtgttgaagataccgatgtggaggacagaacactgtagcatgcagcaccctcctccctcaggttgtcagcccttgaatctctcacgctgtccctggtcttcacagaatcccagatccccagtattagaaaggatctcgggttccccactcactctatcccagcctcttggctcaagttttcatctatagaagtggtgccagccttggccagaggaaagtggcatgtgtggtcagtgtctgttggcagcttcccagcatcaatgttcccattctcctgccactagcacccatatttgacttctccattctaggctgccatttgctgcagtgcttagcaagacattatggaaggttctggtataacggaagggatctacaacatagagtaccaccaatggttacctctggaggtggctgtgctcagagcacctgggcctgggagggaaagggtgtctcagaaagaggcatgtctcctcctttaatcagggttcctcagagattggcatttgaaatctccagactgagtaaggaatattcaccttcaccccacgggggcagacaccatccaatcagtcgagggcctggatagaacaaaaggcaatggaaaagtgaatttcctcataaccctaactaacggaggagacatgcctccctctgagacatccctttccctcccaggcccaggtgttctgagcacagccaccttcagaggtaaccattggtggtgtctatgttgtagatccctattactccggaatcttccataaagtcttgttcaacattgcagcaaaccacagcatagaatggagaaacagaaccaagaatataggtagggggatggacagatgagctttattatgggaattggctcccgtgattatggaagttgaaaagccccaccatatgccttctgcaagctagagaaccagggaagctggtggtgtagctcagtccaagtttgaaggcctgagaacctgtgggtgggggtgctgctggtccaagttatagaacccaaagcctggatctaatgtccaagggtaggagaagatggctgtcccagctgcaggagagagagagagagagagagagagagagagagagaagggaagagagagagagagagagaagggaagaaagagagagcctgcatgcaaattctcttttcctctgccttttttctatcaaggccctcaaccgattggatggtgtctgcccccattgggtgaaggtgaatattccttactctgtccagtgattcaaatgccagtctcttccagaaacaccctcacagatatacccagaaataatgccttgccagctctctgggtatctgggtatcccagtcaagctgacacctaaaattaaacatcacatctccttttctctgccccgctggtggtccccagacagactggcaagagcccctctgcccattctaatgccagctcaagtccttttctccaggtgatatacaggagaaaggcctgtcagtgccttcagggaacacctgcccccagccacagggagggcctttgtccctctgggcgcaggcagtcagttaggtgcatcaggatattctgggtaatgcattctggcatgagtccaggatggggctcaccaagtccagtccaggttgggcagggcccagctcaaatcagtttatgtttctctcagggtcgggtcagtcacaatcagtgtgtatggcagctggcctacaggtcttgctgcactgcagctctgcctctcctgcaaactgcttgagggagaaagagcacactgagtcctcggtcccagacccaatctgggtctgagagggatgcttcttttcaaatgtccaaattgcagcaaacaaccaccaccaccataacaaaatacgtttcttccaaagaagcagcacatctgacagctgaactctgagatgctgcgcctcgtctctacagtcaatccatgcaaccttctagtctaaagtctctgctttggggctacttctcagcatgagaactccttaagaggtggggacgtgttcacaacggcaaaactcggctgcctgtacagatggtgttcccagaactaagaggcgtcagccttcggtaaattcaagtctgcactcttaggaggcaacttacaacttcgaagtgaaagtctatatttttcgtttttcagcgtcagagtctcaggatctcgatgtggacaggcaccctgatacaaaagaacggtaagatggggtacaaaatggattctgcaggtaccgggaggacgttgcaaatcccaatgaaggtgagtggatgcacacacagcctggatagacacgaaatggcacaaagggagagaaaggctacatcccggaggggcagggtgtgggagtcacatcagggctggtgagtcagagacgagggaggatgtgaacacgttctgtgctgtcttgggccccgccaggctcatgtgtggctttgctccggcacacgtgtgtcacatgctctggaactgtggaatcctctggcatgtcaggcgggctcattccatgggggcaggaacagagagcccagtcattcgcacgttcatctgttctatactgcttgcctcccactggctggtctcctgctgggtgctgggaacacagttacaacatgaatgaacccataaggtctttgtttacgcggagcttagggccgagacaggagtcaggtcttaatcaaataaccacacgaatgaacacaccggccacaggcccagctgaaaccttagcaccgcgcggctgctggaggtccctgacggtggtctaggcttcacattaacaaaggaaatgacactgggaggcctgacttgtttttcatgactgcaactgtctcttgatgatcttctctcctttctaatcgtccccagctcagaattttgctagagccgaaccccagcttggaggagcgtaagccctgggataacttctttaatcagaatctggcctgagtccctgctcgaagctcaagcacccggggcctcgcggccgcctgcagtactcccctcccaccgcgggccagggccgactggaaaacggagcaggccatccccagagcacgggtcccgtggccacgttgagtgtcgcagagtacgggacgcagggcggggcttctggaccagcgcgcatcccaattggctctcggggctgccttttagccggacgcgcggaggtgggcaatccgctccttcccttgagcagtccacgccttgtggcggctttgcggagctgctgctttggcgggagttggaagctggtgtgaggtgagaggcgcggtggtcgctccccggcgaggccaggtcagaaggggaccgggatcatccaggggctttcctgcttcaagagcctggtctgagcggcctgttggggactgggcggaagtcgaaagggagggagtgccggccatgcgggtcttgtggcgggaatgagtccttgtggggcgtggtgttgtggagagccccgctttgcctcttcctcggcatcccgttcccctacatccagagagggcatccaggacctgatgtcgggcaggtgcccttcgcacatcttggggtagctcggggagcgcctgtcacgggtctgacgaggaagctgaggcctgaggggccctgggcgggggctgtggggcgccgaggccatgtttgagcagagccgggaaggtgaagttctcttgcggctctctgtagggcacaagcattccaaacgtgggggcaggtttagagttttacccttgatcaagggctgaacgctcagatgtgcacaggctcaggcgtcagtgataatcaaggtggaggcaaacgggagggctcctgctgtcgggctaaagggacagtggcggccagctgagccctgtggggtgtgtgctcagagatgccagagctcagctttttccattacagccgcgactggaaaccttgattttcaaaaaatgtatatgtaacaagccctctgctgttcaacgttggttttacatcataaggttttagcacgttgtgtagtcaaagaagtgtgtgtgtgtgtatatatatgtatatatgtattatatgtatatatgtgtgtgtatatatgtatatatgtattatatatgtatatatgtgtgtgtatatatrtrtatatatgtattatatatgtatatatgtgtgtgtatatatatgtgtctatgagttgaatttgccctcggggtgccagtttgcatcctctgctgtaggagtcctgagctgtgttgttaactggcagatgggaataaccccttgccatggctttgactctgcttccgtagagctagcacagacctaatggggttagatttgggggttgggggtggtctgcagctaggggacagacaccctccttgcaaagcgggcgtggrtttgtagccttcctgtaccatgtgtctgtgaacagggctatgcaacattttcaagataacagagtgcctttgggatgagcctcccgtggcccccgagaccctgggcactgcagggatcctgatcccattactgcttggcttcctggctggaaaccgagctgactggggaaaggaggaacgcgcctggagaattcttgggaggaagttattgtgggtcagctggctcttcctggttccctcttgcacaccgggcagactgctggacatacagagatgagtccctgccctcaggacactctgaccacgtagggagatgaaaccatagccctggaggagggcttygaatggctctttgccgggcaggcttgggctggggaacccaaggaggagagggagggcttagagggtgttccagaagcatcgtggacttagaaccctgggcagaattgggtgggtggctgggaagggagaggctcctagatgggcctgatcgaagtgtggtagggatggggaaacatgattagaccagcccactcatcagggtcgtgctgacaaatagggaagaggggcttttaggcccaaatttttgagccaggagtcgttcagtgctgtttgaaggaacataggtatttattagttcagggaaatattgtggtgggaaggaggggctgaggagatacaagtggcgtcttctgtggagaacgttaatgtgagaggggagtgattgtggaaaagtctgtctttgtccccaactagatgctcattcctggtgagtaggcctctgtgttctgaccctgagttgtccctcttctattagccagcccacattcccgtaatgtttgggtggttacagggctgtctcctggtgaggaggggagggcagctgagtaggacctggtggcctcatggcgatagtcttcttcctccttggcagtcttgtgcctccttccttccaatccagccctcattctttccctctgcacagaaaggatcagcatctccggtacagcccccatctgtgctaggagatggccgggtgggtgtggatgctaagacaaccgatccccctcatgttggcccgaggagggccctgacctggatactgtgagaccttttgaggacagctggctcctttgtgggatcagttgggtgtggggcagggccttgacctgagccagcccctagtttccagcctaggttctcctcaccactaatggcctaagtgatgtctgtctgtcctgtgatggggggttgcagttaccgcaggaggccctggattatggctcagattcttatggctccatccttgcacctttccccggctcaggtttctgtggggagaaggagagtgccagaggtgactggttcgtggttcttctaggctctcatggccaccatgttggaaggcagatgccaaactcagccaaggagcagccccagtggccgagaggtaatgtgkctcctcccattcctcaaatcctctctgccctgccaccccttctgctgtgcccctcactcctagagcctccattgctccatctttccctctctcctgccaaggactttgagtcctctcatctctcctcatcgccctttccaggctagcctgtggtcgtcaggctttgggatgaagctggaggctgtcactccattcctgggsaagtatcgcccctttgtgggtcgctgttgccagacctgcacccccaagagctgggtgagtgatggtagggccaggccccaagcaggaagcttggttctgggagccgaagctctgggaagctgcttcctttatgtccctgcaagcttggctcttccctgccccatgcctctgcttctgtctttcaggggaatggatgcactggtattggttgtatggttgggcggtggcttgttcccaggcctgggagagttgggtgggagaagtacagaggggcctaagtggtggtagggtgtgcccagagggctgggttcttatcatgcctgtgtcagttttgttgttcagttttgtggacatcacccactcagacttccccagcactcagcacatgcttgaagacctcttttttggtttgtgtcatgtgatggtggtgagggagcccagatttctcatggagacccaggctgcgttttctctgctgttgagaagataacttctggagactttcatataccactctgaaagagggtgattctgtacaggatacagcacttcagttttgagcatgggcccctttttcctgagccagcctagaatctggggtcaaacaccttttgtgaaatactgtgctgtaatcttttctcctggaagacttagcaggccaccaggcagagccagaggggcagtacaggggcgtttctttaccagtttgcaaaggccccccaggacatgctgtctctccccctgtcttgcaggagtccctcttccacagaagcataacggacctaggcttctgcaatgtgatcctggtgaaggaggagaacacaaggtagtcagagctatggactggagcaggcttggggacagggacccttgggtgcagggctgctggggccctgctttttggtgccattttcttcctctgatagagaaagaagggccccgtcctctgttccatacacaagcctgcagggaggggcagacttggagctctcttgcagttccttctgtgagcatgtatggattgcccaccgtgtttcaggctgtgaacctgtacccgactcaacagggtgaggggtgggaatggggcacagatggacaggcagctcttcctgctcaggtgttcctagtacatgggtctggggtgtggtccctttctgattgaatagccttctgtgagtcctagtggaggtgggccctctctgaaggatcttccctcctgctctgggagctgtgcccaggtttcggggctggctggttcggaggctctgctatttcctgtggtccctggagcagcacatccccccctgccaggatgtcccacagaagatcatggaaagcaccgggtgaggaggcagggagtgaggtctggctggcatttctgggatcctgaatgggatgacaatgacactaggtaggggtgtttgagaggggtggctggggcaaggcttctagagcatgagctttgcctggracccttccttaaggaggagagtgaagactggaggctgtgccctgctgcagcctcatagcactccttctaaccccctcacagggtgcagaacctcctctcagggagggtcccaggaggcactggggaaggccaggtgcctgaccttgtgaagaaggaggtacagcgcatcctgggtcacatccaggccccaccccgtcccttcctggtcaggtaactgggctgaagggcactcacccttgggctggggactctgtccttctggagagcgggtgttggccgggcttggggaagtgctggactctcctcctgggttgctggatagtgtttaccagagtgggctgcagcctgccttcaccaccgcctcccatccccacattttgccagcacaggttggagcctmtgttagatgcagcacactgttccagggaaacggagggtaaacgagatatgcgcggctgcaaggaggaaggaacagggctgagacagaataccaggaaggggacaaagagcctgtaagccagagccaagaggaagaaaaggcgaacaagaatgaggcgaacagtcttgctagagggaatagcctgagctttggccctgggcaggaaaggactaggtttgctccagaagctgacgtggttggaagccagcaagtgaggggtcgagagctgtgggaggtgaaatcgagaggcagaagggatcaaatcatgtaaggccgtgcaagtttggactggatctccaagtgcagtgaaaaccagttgcaaggttttaagtgggaagtgacatcatgaattggggtcaagagtggagaccagaagggcatctggaaggctgttttgttaatccaggtgagagatcatggtggacagtagaggttgaaaagtggattgagaggtcgaggtgatattaacaggactcactgagggattggacagtgggaacaggggcagtgagrgaagtaggagaagttacaggacagccccgtttctagcctactttctggtggtatggacagagaacaggctttgggagaagtgagttggcccaaaaaggtagtttggagagagagagttttggtacctgacatgcttgtggagacactgaggaggcagctgcatataggagcctggagctcagaagagaggttggggccagagacactgcgaggctttagcatacagatggtgtttaaagccaaggagatgaatgagtccctgagtacaggtgggcttgggggcagcatgtgtcaagctcagctgtcttgaatgtgctgagtggccaactgagcaaggacagaaagtagaggttgytggtgaccttgaccagccctctgctgttctagtctcttgatctgcctaccttgacatcagccatcagcctccctttctgtgtttccttccctccaagcctagctcagattgcaggctcggggtgctaataatgctctttcgagggagtcatgggcatgaccccccgctgtctaccttctctttgcacctgagcagcccagcgttgccagagaaacacayaccagtggactggtttccttgctaagtgcaaatgtcacagggacacatggcactctccagggctcccacccagcctgctccttcttagacttatccactgtcaactgattccccatctcatgcttcacagaaagataaaagccatcacatggggacttgctgcttatccagcacatttccctgctactacagctatgtgtctgtcctaaattaaagctggtcctatgccggtgcagtggctcacacctgtaatatcagcactttgggaggctgagcggggtggatcacccaagagctgaagaccagcctgggcgacatagaccagccagggcaaacttgtctctccaaaaattagccgggtgcactgttgcgtgcctgtggtcctagatgcttgagaggctgaggtgggaggatcgcttgagcccaggaggcagaggttgtagtgagccaagtttgtgccactgcacttcagcctgggcaacagagcaagaccctgtcctaaaaaataaatagagctggtcctcctgttgkgctgcagggacaaccccacccacctgcccaccagggattttgcccctgcagttatcccctttccttcttctattactaatccttcctttttatttcaccttttctggtagattgtgaagaccaggctgggttctgcctggagagaggcttggtcctctagtctcctttagggtaaattgaggcagatgctctgattctgatgtgaggcagctccaccatgaggtcgtgggagagtagcagcgtctggtgggcatgaactctggtgtcagaacttccagtcccagcactgctacttcttagcgttcactaccaggaagcagttctgtagcttccctgagtctcactttccttcttctgtaaaatgaggatagtggcggggcctgccctaaggagcactgggcagccctccaagtgccacgggccgagcgtcactccttgccgcacctcaggcctggtgtccctccccaggctgttcagctgggcgctgctgaggttcctgaactgcctgttcctgaatgtgcagctccacaagggtcagatgaagatggtccagaaggccgcccaggcagtaaggcccgccctccattgggttggggatggtgggagcagaagagcagaggctgggccaagcccttaagtcaggagcagtccccatctggtcctgcttcctggcctctctgttcccagccatacagcagtccagtccccatcagctggtgggaaaaatcccctgctctttgccgaccttcccttatgtctcacggccctgctcccatggggcttcctctaacgtctttccatcatggtcttaacaaccatgacgtcagtgcgtcggtgcagttaccttaagagttgtctaaaggctcctttgcttttgggaaatgtgctcagaggaagaactctgcagctgaactgtccctccctctggggctgccctgggtctttggctgcctgtgtcctcagggtggggcaggttggcacttccctctggctctccccggagcagggcttgccgcttgtcctcctctctactcacaaaaccctcctggatgggatcctgctgccctttatgctgctctcccagggcctgggtgtgcttcgtgtggcctgggactcccgcgcctgctcccctgccctcaggtaaaaaccttttgcctctagacatacatgggagaagtcgcaggctggggcggggtgtgtatcggggtgtgttggcagcagctccctactaaaggccctcttcgtggcctctctgctccgagccatacagcagtctagcctgtggggcttagatggaggtgtcagccacagggcctagggccatggctttgcctcagggtattcaagtaggacacaggctggccatgggggagctgagactctcactagccccttactcattcacatcttcagagcccctttccttatcaggctctgccctatgtcccacagagctctgctgaggaagcttggggggcttttcctgcccccagaggccagcctctccctggacagctctgaggggctccttgccagggctgtggtccaggcggtgagtgcccccagtggttacatatgggccaggctaaggggacaggggtctgtttctgctctggccttaacaccccctctgacccctcctattccaggtcatagagcagctgctggttagtgggcagcccctgctcatcttcctggaggaacctcctggggctctggggccacggctgtcagccctgggccaggcttgggtggggtttgtggtgcaggcagtccaggtgggcatcgtcccagatgctctgctggtaccagtggccgtcacctatgacctggttccggatgcaccgtgtgacatagaccatgtgagaatgtgagaccttccagccccttgggcccctaggtggacaccagctcccgataggaggcacaatattgtgtcctgtggctgagccccacttagggctgtggggggcacaaaggaatcgtccttacaatcatctggcagcacctgtcaaggccattaccatcatctcatttcatcctctgaagaccttgatagggagggatttttcctgtgtcatggataaggaaagaggagcttgggacaaggtcacgcaccagtttgggcctgagataaaactgagcagggtgggaccagaggatacctctggagaccaggatgggtgggcagccctgatgtccgcccgagagcagtgtcctcggcgagtatagttatcctttccctccttgcaggcctcggcccccctggggctgtggacaggagctctggctgtcctacgtagcttgtggagccgctggggctgcagccaccggatctgctcccgggtgcgcctagctcagcccttttccctgcaggtatggagccagctggggaaggctgggagtacctggggtgtctgtcctaggcatcctggcagcctggccctcaaagccactgcagggatagctttgcctacttccagtgggctgtgtgcaagtttcctggtgggcccgagcaggccacctaagagccttctcttgggcaggaatacatcgtcagtgccagaagctgctggggcggcagacagaccctggagcagctactgcagcccatcgtgctgggccaatggtaggggcacaggagcgtggggtctcagggggcaaggcaagcagcccttcagcaccagcttatgtatcccccatatacacacactagcagccctccctcaccaaatatcctggggtcatctagaatagttccaggtactcgccttgccaacagtctgagtgtggggtatggcacagaggcctggatgggactggggattatagaagccatcctctgtcctggggctgggagggggaaacaccctcaccttttagaaagctctaggcattcccacagctgtttttgtgtttggacccttcatcctgtaatctgtgtctctatctcagtactgctgtcccagacactgagaaggagcaggagtggacccccataactgggcctctcctggccctcaaggaagaggaccagctcctggtcaggagactgagctgtcatgtcctgagtggtgagggtgaaccagatctgggcctttgagggtgggtcactgaaccgtcccctctgtcggggtcagccagtcaccagggttctccattccaagtgagtgtctgcacctgaggccctctgtggtacctcggggacatctgaagaagaatggaaccctcctcctacaggaggagcaggcagccagggccatcatgagggagcagctaagtgcatgcacagagatggtggcctgaggccaggaggctgcagctgcttccccaaggccacacccagccctgccttctgagcggagtctccttagctttgggtggggatggtgttaactgaatggaatgatacgtgtaaggggcttagcatagcgcctctgcagagggcccttatagggagatccatctgtatcttcttcagtgcccctctagtagaggctgtgggttgatgtgtgggccctacgatgagatctagggaaaggcccccagctcctggcctgctctcagcctgtgtgtgatgataaacaccactgctccgggcatacgttcctcatccctggggtggagttgggatgtgtggctaggaagacttgccagatcatggagggaccaggctgctgggcctcaacctgaccagcatctccaccctccgccccactccagccagtgtggggagctctgcggtgatgagcacggccatcatggcgacgctgctgctcttcaagcatcagaaggtagggggtgcaatgtggtggggacctgggcggttggggtgggggggtggatgtgtggccctgctgctcagccctgctttgcccacccagggtgtgttcctgtagcagctcctaggggagttctcctggctgacggaggagatactgttgcgtgactttgatgtaggcttctctgggcagctgtggagcctgctgcagcactcactgagcctgctgcgggcacacgtggccctgctgcgcatccgccagggcgacttgctggtggtgccacggcctggcccaggcctcacacacctcacctggcatggctgagtgctgagctgctgcccatcttcctgagcgaggctgtgggcggtgagtcttgaggtgcacggggggtaggtgcacggggggtaggttcacgaggcgggtggatcatgaggtcaggagaccaagaccatcctggctaacatagtgaaaccctgtctctactaaaaatagaaaaaattagccagacgtcgtggcacacacctgtagtagcagctattcaggaggctgaggcgggagaatcgcttgaacccgggaggcggaggttgcagtgagccaagattgtgccactgcactccagcctgagtgacacagcaagactccatcccaaaataaataaataaataaataaataaatagcttttgggcagagatgatggggtcaaacagggatagtttgacttcctctcttcctactcgaatacactttatttctttctcttgcctaattgccctggccagaacttccaatactatgttgaataggagtggtgacagagggcatcattgtcttgtgtcagttttcaaggggaatgcttccagcttttgcccattcagtatgatattggctgtgggtttgtcatatatggctctgattccttcaatacatagttgattgagagtttttaacatgaaggttgttaaattttatcaaagccttttctggatctattgacataatcaggtggcttttgtctttagttctgtttatgtgatgaatcacatttattgatttgtatatgttgaaccaaccttgcatcccagggacgaagcctgcttgatcacggtggataagctttttgatgtgctgctggattcggtttgccaatattttattgaggatttttgcatcaatgttcatcaagcatattggcctgaagttttctttttttgttgtatctgtgcctggttttggtatcaggatgatgttggcctcatacaatgttaggaaggagtccctccttttcaattgttttggaatactttcagcaggaatggtaccagctcttctttgtacatttggtagaattgagctgtgaatccatgtggtactgggctttttttttttttttttggtaggtaggctatttattactgcctcaatttcagaactcattattggtctattcagggattcaatgattcaatcttgggagggtgtatgtgtccaggaatttatccatttcttctagattttctagtttatgtgcatagagttgtttataatattctcagatggttgtatttctgtggggtcagtggtaatatcacccttattatttctgattgtgtttatttgaatcttctctcttttcttccttattagtctagctagtggtcaatctattttattactttttttcaagaaacaagctcctcgattcattgatcttttgaatttgtgtgtgtgtgtgtgtgtgtgtgtgtgtgtgtgtgtgtgtgtatcttcttcagttcaactcttattttggttgattcttgtcttctagatttgaggtttgtttgctcttggttctccagttcttttagttgtgatgttaggttgttaacttgagatttttctagcttttgaataaggtcatttagaggtataatttccctcttaacattgcctcaactgtgtcccagagattctggtacattgtctctttgttctcattggtttcaaagaacttcctgatttctgccttaatttcattatttagccaggagtcattcaggagcaggctgttcaatttccatgtagttgtgggacacttctgagcttcatgagctcttgtaaagttggtctggtggtaacaaattttctcagcatttgcttgtctgaaaaggagcttatttctcctttgcttatgaagcttagtttggctggatatgaaattctggtttggagtttattttcacacattcactcatcacttccctgcacaggcgaaggggttccccttggctctttgtcacttctgggtgggctgtcaccctgccctgcttttttccattctccatgggtggagctgttttcctgatcagttccagtgtgagtacttggatatttcagttgaaggtgctgtgtttactcatccctttcattcttctctgtgagagccatgcaccatagctgcttctagttggccatcttggcccccttctggctgagcctaattctgtgtaatagaggttgtacatagatatgccctataaacacagattatagagaaggatcatacaatatgatcatacaatatgatccttacatatgcacatacatgtgcaatatggctctgcatgtgtcatgcatcagtcaaaattactctgttttttacttcagggtatcttgactatagtgtttcatatgtgtttctgtttttctctgtatcacaattttagatcattgaatggactgctgggctagacctggcaaattcttctgccaagtgtactatatgtctaggttcatgtcactgtgtgatatcggtgtccttgtgacaactgtagggggatataagagcaacagtgaaataaagtcatctctcacagctggcatgtatattcctataaa

SEQ ID NO: 94463 - DNA, 14258 bp, Homo sapiens
gttagaagggctaaaagaaaagaccaaatagcctaaataggatgtctgctttaatttggtatcttaaggcatctaaaagactctaggaatctaaactagtgtctctaaaagataacaatgccaaattaattcaaagactaaattagaaaaaacccagaagcttctaaaaatgaaacaaatctggaaacaagcacttctctatttgtctttgtcttgtgtctcctccccctcctagccctagctattccatttcactgccattcttggcaccctctttgcttatatggtaaaaacttattctaaacctgagcaattcctcctgggctttccataaagagggttattggattgagtcgctattggaataattataccattggaaattctaatcatcagtggccaaaagatggatccttttagagatctctcattctaaacaattaccttatttgtatataggggaggatcaaatttcttttaaaggacatataatagtgtcatgcctagccttagaaattttcttgactaaattaaagggcaatcctaaatcaaagttaaaatattttgtatgctcaaactgtctgctttggagcccatgcaggatttacctccccccacccaccccccaaaaaaaaacactttaccctatggtctagggctgggatttgatgctctcactgccagggcccaggttcgattcccagtcaaggaatcagtctctgctgatgtaagcccttaaacgcaggaaaagaaacatttattgaaaaattggtttgatatttatgtgacttaactttttggggtattcatttgttattgatcctctcccctcccatgaacatcttttgagttcctgtcttaccaactttctcttttaatccttcatctgtgggtacatgggatggtcagcttttgtgtgtagacagtcagctaagaagctgagatgttagagaatattgctggacacaaatgtgggttgtatcccatttgtggctagcaaaactgtcctttctttgagctgtctttgggatggttctgggtcttgtgaggaatactttgcatttggaaatacctcatgtgtccttggttaggtcatatgcttggttaaagcttttcgggtttggtgagtcatttgaaagtcacctttgggggaaaaaagttcaaaagccagtaatattgactgtttttcctggatgaaatctgataagatatttgaaaagacaccctttttataggaacactatagtcagaaatcggcttaattaaaagtggattttcaggctctaatatttttaaaggcctttctgctttttctagtttagattctgttttggggaattttttcagtcaactgaaatctccttttcaatgatatgtttggtccttctgtttgctccctttcttgttggcatgatttttgctgagaaaaaatgtaaagcttcattggtctttctgggaaacttaaaattggctccccaaattggctccactaagacttgttccgtttccttccacttctcctcctccttcctttttgtcatcttcaattccatataacaaaatctaaaggagacttctagcctccctaaaaccccattaaaaggtgcacagagaaaggtgccacacaactcctttttaagatcttctgttttccttgtggagccccaagagtcatggacaggttcctttcagatctcaagctctggtctcttttgcattgagttccctggtctctctggcttttgggggtaccaaggattagtttatgctgtgagagaaaacttgacctatgtgtgtttgatgactggtgggtcactagcaagggctgcagttttgaaggtggctgacagtggttatttagagtgaatggttattactgcacaggctactcattttttttttttgcatgtttaaatttttaaaaaaatgtggtttgcacatttgcaggccatgagaacatttgccactgagggatgactcctgtggtgaatgggctgatcacagagtgggctaatgagtattgggtctcccaccaccttctggaaatgtctttgcagcgaagtacactgtggaagccttgcgcagcccagtcctgtagtgtttctctcttttggaggacaagggattcagtgtaaagatgggatccttgatttggggggatctggatgctctgccttccagctgctcctgcttttcacatacataagtgttaggtcatggaaagtgcaaatgatttgttggccctattctttaatgggctctgccctgagctcagtggtccagttgaaaaacagagactaaattagaagccacctatctaaaaatattagtcttcaaaatatggctttctagcatttggttattttgaaaagctttctgaattttcctaggctcatctgtataatcctatggttaattcctatttattttgcgttacattggtatccatttttaatctttctctcactaacacacccaaactctttcttgaaaatgcttaaattctcttcctgtgctttgagatgtaaattttctaccctcttttctctaaaactcagtaaaagctttggccatgtgggacagataaacttcaacttgttccatttacagaggcacaatttaatccaactttctttttaaactagtgaatttcacctgtcgcatgactaatattttacaatcaaagctatacattctttgtattttatgtatacatgtgtacatgtcggtttgtacattgaataaatgatactaaatttacttataaataaatgagtacttataaattaaataactaggccatatgctttttgaattcacgtgacttcagtaatttttagtaaataaagctagtttaaaaattgttggtaaaataaaatagaaatgtcttcagaattttagatatagtcacctgagtctaccactcaaacaaatgtatgccatctctactagatgttttaaggtcataaaagtcttgcttctgtgatcattttgaggcttgcttgatgtgtctgtgagctaaagctgtaatgggagggtgatggacctccctaaaaccttgtacacatctttctgtgaacttaaagtcttttattttcagcctttaaatactggggtgtagacaggtggccatggtgaagctggaagacataggtatgtccacagtgcctaggccacaagctgcagagcagagccaagcccaatatggcctcatcctctctggcccagctgtgtccctggccatactgggaagggtcggatccttcaggcattgtcttcacagctctgtcccctgtcctgggctctgcacctgatatatataacattaaaattacttaactcatatgttttactctagaaatttgggttactgaaagttaaaattatagttaatatatgtaattaaaattactggatataagagaaacaattctgtacacagactgcataagaaaagtaggatgtttttggtaagaaagtttataagaaagacaagtgaatgtgttttttcttcaaagaaaagtaatctttgtctagtttaaaggtgatttaaaggttgcttttgttaaaggaataaaaaagaattatagatatacctgaatggatatagaaagttgaggaaagagagagaatgaaaaaaacttgtaagagtttataaaagagttgtggaaatcttatcttatgtggtcagtctaagaatggataaatttgtttatagaattttagtaaaattagctttgtattaataatagaccaatgtaaaggtagaatttgattttctcttttgaacaatatttttgtttagtaataataagaaacagtaaaagactaggttcaacttttaagtaaattgcaaaaaagagaggagtttgcctcatgctgtctttattaggtcatttgattatttagaaaactgttttctgtcaaagagtaaaagtttttagctttgtgaagcctttttattatcactttggctaaatgaatgactattattttacagtgacctgtgatcctattctgatatcaagtgttttaaatctttgatatttgacaaacttcccaaaatgaaatttaaaattctaaattaagtctttttgactttaaacaaacttttagacatttttaaaagatcctctgagaaggagtttgataccagcctggccaatatggttaaaccctgtctctactaaaaaatacaaaaattagcttggcatggtggcatgcgcctgtagtcccagctactcaggaggctgaggcaggaggctctctggaacctgggaggcggaggttgcagtgagtgagatcgtgccacttcactccagcctgagcagcagagcaagactccatctcaaaaaaaaaaaaaaaaagatcctctgagagttcaagaaaacatattaggcttattttgtatgttaaaatcaaatggaaatcatggtccagtaagaaatggtgtttaactttgaattatgttcatagggatgttattaatatgtgttccaaaattgtgtgagattcaaaaaatctgatatgtcctagtaaattgctgtattctgatgctctttttctaaaaggtcttcgtaaatcttaaagtgttgtgtcttcaaggaggttcatggaagagggtctgacagatactctgaaatacagaactctgcttatgacattcaaattattcaactgtactgggtaaaattttttttaaaactctaatttaaaaagctgtattcataaaattggtaacccaacattaagcagaataagaattaattacatgagactaacttgatgaaggactgaaatgatttttatgactttttgctagaaccattgctaattctttttatggttttgttttccagagttaagaatttttttccctcttaagctgtttttaccttatatcaatgggtaatgtatacttttgttaacaaaactgagacgtttacctttctctttacccgatttatctagaatccacaaattattcatgagtattcttattttatggcaatatagttgtctgcctaagttcaataagaatctgttttcttctgtgacaggatacaattgagacactggttattttaccaaggctttgactggaatatcatatttttgaatgtgaccagactgctttgagaaattgagattgactttaaagccaatagatgtggaaaaagactggcctggtaccttgtctacatgttcccctacagggttcctgacctttcagtatttaaagaatgtcactttctgataggtccagaaacctcaaggtattttgacaactctaacaagagaagaattcagctgggtctggtggctcatgcctgtaatcccagcactttgggaggctaaggtcggtggattgcttgagcccaggagtttgagaccagcctaggcaacatggcaaaaccctgtttctacaaaaaataaaaattagttaggtgtggtggcatgcacctgtgaacccagctactctggaggctgaggtgggagaatcacctgagccagggaggtcaaagctgcagtgagctgtgatcttgccactgcactccagcctgggtgacagagtgagaccctgtctcaaaaaaatattaaaaaaagagaattcaaccaattcatacaagaattacaagcacaagtctgacggtgaatccttagcttggcttcctacacttaagaagcttttaaaaatcaaatctggtatttcctattttaaaaagtttcaggagtaggaaggaagagcctcctgggaaggtgatgactcaactgtcctactgagaatgagaaataggtatagctttggatgtgaaaagggtccaaaagcccatttcttgcagaaagccataaatagaaagggggagagagaccacagtgtgtttggagaactcaagtagttaaatttaaggtgctacgaaaccactgagcaaaagaagagggtagagactttgtaagcaaaagccagattgtaaaggaccttatattaatatatcatagccaagcagtgggaagagctctgttaacaatgcaatgttgtgggataaagttctcactagtgggattggccatataaccaactgcttcctaagtgttgaaggaaccgatggagataaatcctatcttatgacagaaggatcagatgaaaaaagagtgtaaagacaattaatcaactggcccatgcccttcacatggacaaaaacttgaaagctggctgtcttgtacatgtgttttggccaaaagcaaaatgtgccctcttgagagattacctggtgttagtagacagtccaggcacagatgttactacagagctggatagctggattgataagttttgcctagatgctgatgtctttgttttggttgcaaactctgaatcaacactaacgaatacggaaaaacatgttttcacaacatgaatgagtggctttccaagcctaatattttcattctcaataatcgttgggatgcctctgcatcagagccagaatatatggaagatgtgggccacctgctgaaggatttcaggcaagattacaggaatttcagaattttgaacaaatctttgaggagtgtatctcacagtcagcagtgaaaacaaagtttgaacagcacactatcagagctaaacagatactagctactgtgaaaaaacaatggattcaataaacatggcagctgaacagaaaaggcattatgcagtggaagagaaggaagaccaaattgatagactggactttatctgaaaccagatgaaccttttaacactggatgttaacaaaaaaaccagggaggttactggggaggtggcaaacaaagtgtcatgtgcaatgacagatgaaatttgtcaactgtctgttttggttgatgaattttgttcagtttcatcctactccagatgtattaaaaatatataaaagtgaattaaataagcatatagaggatggtatgggaagaaatttggctgattgatgcaccaatgaagtaaacaccttagtgcttcagttccagcaagaaattgttgaaaatttgaagccattacttccagctggtatataggataaactacatacactgatcccttgcaagaaatttgatcttagttataatctaaattaccacaagttatgttcagattttcaagaagatattgtgtttcatttttccctgggctggtcttccctcgtacctcaatttttgggccctagaaatgctcaaatggtgctcctaggattatcagagcctatctttcagctccctagatctttagcttctactcccactgctcctaccagtccagcaatgccagataatgcatcacaggcagaactcatgattacattagtaacaggattggcttctcttacatctagaacttctatgggcatcgataatgttggaggaatgatttggaaaactataggctggaaactcatatctgtttcattaactatgtatggagctttgtatctttatgaaagactgtcctggaccacccatgccaaggagagagcctttaaacagcagtttgtaaactatgcaactggaaaactgaagatgattgctagctccacaagtgcaaactgcagccaccaagtaaaacaacaaatggctaccacttttgctcgcctgtgccaacaagctgatattactcaaagacaactggaagaagaaattgctagattacccaaagaaatagatcagtgggagaaaatacaaaacaatttaaagctcttaagaaataaagctgttcaacttgaatatgagctggagaattttactaagcagtttctaccttcacgcgatgaagaatcctagcaatagagattgctttggtgacaatgataggaggaaatgaaacttgtaagatcaggacaattgttatttttatgaaatgactttaaatatgaattttactaactgtacctaaatagcaaagccytatgtagattctgttagtgatgtatctcagggtattggtatttttgaagagtattgtgtccttagttttaattttgggtaaagaaaaaactaaaatctggaattagttacaagcaacagcaccaacttatgtgacccttgaggggtggggctgtgagctcttaatttgtttttgattctgaaaatctctgcttcctggcatycaggagttagagattgagcctttcatcttctttctcaaaactagtttttgatgctttctttcctgggaatagtcactttttaattttatttaataaactgcattgctggaaccacacacacaaaaagtttcagcaaagccaacttaaaaggagcatatatgaccaatcattatttttgctacactttatgcaaataatcaggccaattatggtaagaccaaaagttattttgcaaataaattggccctactatgattcatctttggtaaaagtgggaaactgaagacagaaaaaatgtgtttcagaagaaaactatagaacatctgttattagattctaaccctgaccattatttttttgagtttttattacttgcctacaatttagactgaatcttgaattctttcctggctacaagtctccaaactaacagttccacatatttcttccatttttccaactgaaattgctactaggtttgtttttaggacctgcaaactgaagctcatgtataaatgaccttgacatacaaactacagaccagaaaatcctttcatattgccactgcctatttccactttaattgagggtttttcaagtctaacatctagacacctcaactgactgctctctagactccaaggaaactggtttatagactattccaaacaatagctgttttttgtttgtttgtttgtttgtttgtttgagacggagtctcgctctttcgcccaggctggactgcagtggcgccatcttggctcactgcaagctccgcctcccgggttcacgccattctcctgcctcagcctccgagtagctggaactataggcgcccgccaccacgccggtctaattttttctatttttagtagagacagggtttcactgtgttagccaggatggtctcgatctcccgacctcgtgatccgcctgcctcagcctcccaaagtgctgggattacaggcgtgagccaccgcgcccggcctagctgttgtttttcttctgttgagagccggcttgcaatgccatctcctgaaatatgacacaactgtttaattggactggcctcttccaagaaataggggactagtttaatgggatcctttgtcattcagctattgactcaatttttttctccacagacaccaactcagattttagtgtgtgaaagtcttggggaagtatcagataggggaatactggagtgcagaaaatgatcccccataatatggcacgttggcatgctgagtgtttttgaaaattgaaaagcccaagaaattagcctcataatcaaagtcgttttaaccttgtcttattcttcccatcgaagggccaggaaggactctctgaatttccttatctgaccaagaaagttcctttccaaaagaaacacaattgccttctatgcccaccctgaaatctcatctatttcggaaaagaagaatgaggaataacatttagacatggttaattaaatgaatgcctctcctgatatacagctaattactatagactaatgtgggcctcctcacttaaatagctcccttgttactcaaattgatcagtctctaaagccttggatacacactgactttcaacaaccccactccatggaacataacactctagaaacaaatgcttccagatctgagggaaactaataacaaatctgtagcttaccaatcaataattgatcagtgatgctgcctcacatcagatcttaatcgaaacgggaatgtgaaatgtgatctacaaaatgatgtcattctggttcagagatgtataatgcagttgggaagtcactcgaaaaagtactacctgcacaacctgcaaccttgtaaaacaggaactttcttgaacttttttttttttttttgagacggagtctcgcgcttgtcacccaggctggagtgcaatggtgcgatctcacctcactgcaacctccaccttccgagttcaagctattctcctgcctcagcctcccaagtagctgggataacaggcacccaccaccacacccgactaatttttgtatttttagtagagacagggtttcaccatgttagccaggttggtctcgaattcctggcctccagtgatcctcccgcctcagcctcccaaagtgctgggatgacaggtgtgagccactgcacccggccgcctgaactttgaactggactaaaccaccacaaccacagtatcttggaaaacagctgaattatcccagtgctgcaactcttgatcagaaacaaccaatgaactactcaggcagccacctccacaaatgataattcttttgaaacaacttgggtaatcatcctcatcatccttttggaaacccctacttcccttcctccctttggaaaacattttggcttctaactgaacctgtgtctcctgaattgcaattcctatgaccccaataaatgccttatcttactgctttgcagtctagtctttcttggttgtgttaaagttgcagataccaggatgaaatcacttttgtccaatccagacaaaataataccaggaaggaccaaaggaggggaggcacatgcttacatgtctgagataagaaccattttcaaggactttctaaaaaccctttacatatctcctactttgatgaggcttatcactacacattctttaggactgcagtcattccaataagatgttctcagaagaacagttctccagtaattgcatctccaccaataaactgacaactctagtactgaacctggggaaccaatgaactctttttctatgcagcttatgtaaatctttttttgctcataaaagctccccttccccttccctccctgaaagtactggtgacttgtgattccatgcattctggattatgatccctatttcttttttttttcctattcctatttctgagtaaacccaacatagaggtaattttctctagtgttatttttttagattaacaattgacattgaaaagagtctagcttcctctgttcttctttcttgcttcctttctcaccatgtgatctcttagcacatgcccacttcccttccattttctgccatgagtagaagcagcctgaggccctaaccagatacagctgctcaatctggaagcatccagccaccagaattatgagccaaataagcctcttttctttataatttactcagcctctggtattctgttatagcaaaactaaatggactaagagagaaagttggtgccaaggagtagggtgttcttataaatacacctgaaaatgggtaagtggctttggaactgggcaatgggcagaagttgagtttgaaggtacaagctagaaaaagaaaatattacagtgaaaagagcattaaagacagtcttggtgggggcttagaaaatgagctagaacttattagggattggttaggtggttgtaaccaaaatgcttacggaaatatgaacagtcaaggccagtaagatgaggtcttggatggacatgaggaatatttatttggaaactgtaacaaaggtcatcattttatatagttgcaaagaacttgactgcattgtgtttatgccctagggttttgtggaaggctgaatttaagattgatataatagcatatcttgtggaagaaatttctaagcagcaaagtgttcaggctgctgccatggttacttctaagtgtttatggtgatttgctggagaatttggaaacagaacagaaggatttggaaaactcacaacctggatgtgtaatagagaactttcaaaagagcactttcaaaacagtactttcaaaagaggaatccaagggaatggcagacttgctaaagagattagcatgtctaaaagagtgccaggtgttaactcaagacaatgggtgaataacctgaagacattttagaactttaaggctgcctttcccatcacaggcccagagacctagaatgatagaattgtattggaggagagacttggagggctgctgctctggtgacctcgggacactggtctgtgcatcctgaccactctggctggagcagccatagcacaagtggcgccacatgcagctcatgcccctgctccagaaagcacaactgggaagccttggcagcattcatgtctacgtggtactcattttgcatgcatgcagaatatgagagtaatggaagcatggtggcttccacctaaatttcagagtatgcatcagaaagcctgggagccaaggcagaaagttgttgtagtgcagagccactacaacagtagagagagcctgtactaaggcaatgctaaccagaaatgtggagtaggaaataccacagaaggtccccatgagggtaatgaacaatggagctgcagggtaggactacaacctggaccccagaattgtagagccaccggcagcatgcaacctcagcatagaaaagccgcagtcatttgactccaacctgtgagagtagctacgtgggccatgtccagcaaaaccatgaaggcaaggctgcctgatgtcttaggagtccccccctcataccagtctgcccaagatgtaggacatggggtcaaaggagattattctggagtgttaagttttaatatctgttccactgggttgtacttgtatgaggcttatcatttctttcttttggcctatttctcgtttgtgaaatgggactgtttaccaagtgtttgtcctactgttgtatcttagatgcaaatagtttctttttactttcgtttgtttatctgtttattttttagagatgggttcttgccgtgttgcccaggctggtctcaaactcctgggctcaagcaatccacctaccttgacctccgaaagtgctaggattacagatgtgaaccaccatgcccagcctacttgtttttgattttacaaactcatagctggactttggacctttgagttggtgctggaacaagttaatacttttgggacaattgagatagaatgattgtattttgcatgtgagaaagacatgcattttggtggggccacgggtggaatgctatgatttggatggggcagctccatcagaacttctgttgaaatttgatccccaatgtggtggtactggaagtggggcctagtaagaggtgtttgggtcatggggttgaatccctcatgaatacattcattccctcccacaggggttagtaagttctccctcttgcagaaatagatcagttcccatgatatcagcttgttaaaatgtctgacttccttggtttctctttcttgcttcctctctcaccatgtgatatcttggcatgagtggaagcaatctgaggccctcaccagatccagttgttcaatcttgaactgtccagccaccagaatcaagaaccaaataaatcccttttctttgtaaattacccagcctctgggattctgttatagcaacactaaatggactaacaatactgcccactgtcaggcctctgagcccaagctaagccatcatatcccctgtgacctgcaagtatacatccagatggcctgaagcaactgaagatccacaaaagaagtgaaaatagccaattcctgccttaactgatgacattccaccattgtgatttgttcctgccccaccctaactgatcagttgactttgtgacaatacaccttccccgcccttgcgataatgtactttgtgacattcccccgcccttgtgaatgtactttgtatgatacaccctccccacccttgagaaggtactttgtaatattctctcccgcccttaagaaggtactttgtaatattctcctcacccttgagaatgtactctgtaagatccaccccctgccagcaaaaaattgctcctaactccactgcctatcccaaacctataagaactaatgataatcccaccaccctttgctgactcctttttcagactcagcccacctgcacccaggtgaaataaacagccttgttgctcacacaaaatctgttggtggactctcttcacacggacacacgtgacacccactcccaaatgtctgtctttcccttaaatctcttctctgagctcaagtctcatatatccaactgtttgattgccatctcttcttggatggataatcgccgtatctaacttaaaatgc

SEQ ID NO: 94464 - DNA, 32186 bp, Homo sapiens
ttttaaaaaataaacctaacttccctaccacttgtgcctttagccacttggctacttctctgggccccaaaggtttttgttagcaatgacataatcctttcttttctttctttttttttttttttttttttgagacggagtcttgttctgtctgcccaggttggagtgcagtggcatgatcttaattccttgcaacctccacctcccaggttcaagcgattctcccgcctcagcctcccgaatagctgggactacaagcgtgcaccaccatgcccaactaattttttgtgtttttagtagagatgggtttcaccatgttggccaggctggtcttgaactcctgacctcaagtgatctgctcacctcaccctcccaaagtgctgggattacgggtatgagccaccacacccggcctcataatcctttctttatatattttaccttattcctttttttttaacctctaatatcttttttttttcctttgagacggattcttgtttggttgcccaggctggagtgcagtgacacgatctcggctcactgcaatctctgcctctggggttcaagtgattctcccacctcagcctcccaagtagctaggactacaggcatgcgccaccacgccaggcttttttttttttttttttttttttttttttgagacagagtctctctctgtcacccaggctggagtgcggtggcgcaatctcggctcactgcaagctccgcctcccgggttcacgccattctcctgcctcagcctcccaagtagctgggattacaggcatgtgccaccacacctggctaattgtgtatttttggtagagacggggtgtctccatgttggtcaggctggtctcgaactcccgacctcaggtgatctgcccgcctcagccttccaaagtgctgggattacaggcgtgagccaccgcgcctggctaatttttgtatttttagtaaagacgggctttcactatgttggccacgctgatctcaaactcctgacctcagatccacctgcctcagcctcccaaatgctgagattacaggcgtgagccactgcatccagccttctcttttttttttttttttttttttgagacggagtcttgctgtgttgcccaggctggagtgcagtggtgcgatctcggctcactgcaagctccgcctcccgggttcacgccattctcctgcctcagctcccgagtaggtgggactacaggcgcacgctgccacgcccggctaattttttgtatttttagtagagacggggtttcaccatgttagccagggtggtctcgatctcctgacctcgtgatccacccgcctcggcctcccaaagtgctgggattacaggcatgagccactgtgcccggcctctgccttctcttttttttttttttttttttttttttttgagacagggtatcattctgttgcccaggttgcagtacagtggtgcaatcacgcctcactgcactggatctcctgggctcaagcaatcttcccaccttagcctcccaaggcacataccaccatgcccagctaattttttattttttgtagagatgggggtctcactatgttgtccaggctgttgtcgaactcctggactcaagcaatccgcctgcctcagcctccagtgttgggattacaggcgtgagccaccacacccagccaaatatactttctacatctttagtgcttctaagaagtaagatagatttggaggtatgtgctgatcctgaggacaagtggaaaatatttacatgtagtttaaagttacatgtagtttaaagctataaaaacaataccttctgaactaggactctagtcaccttggaatttctattccaaaagtggagttaagctgagaatttcctaaaattttactaagggcctaggacacccttcactgtggattccctttttcctgcacttctgtggaaatctagctttattttgtgcacacttttttccttaaccttaatctggtagagaaaagtcggaagacgcctcttttcttggctttctattggacccacctcttttaccctatatcaaaggcctatttggccacaagtatcagaatcttataacctgacacattatgaccaatctggtccctgagaggcagtatggcatagcataaacaacaagggctttgcattcagatagactgggggctttacttctttgagaatcattttcctgttttaaagggagtatacttgacatagttgttttaggaattaggtgaaatagtgaaggcatagcaccgggtgttcagtagtagtctagggtggaggggcaacagcccaagttttaagaatagatgtttcaagccaggcatggtggctcacgcctgtaaacgcagcactttgggaggccaaggcaggtggatcacctgaggtcaggagttcaagaccagcctggccaacattgtgaaaccccatctctactaaaaatacaaaaaaatagccaggtgtggtggcgggcrcctgtaatcccagctactcgggaggctgaggcaggagaatcgattgaatctgggagtcggaggttgcagtgagccaagatcgtgccattgcactccagcctgagcaacaagagtgaaactccatctcaaaaaacaaaaaacaggccgggcacagtggctcacgcctgtaatctcagcactttgggaggccaaggtggtcggatcacgaggtcaggagttcgagaccagcctgacatggtgaaaccctgtctctactaaaaatacaaaaattagccgagcgtggtggcgcgcacctgtaatcccagctactcaggaggctgaggcagaagaatcacttgaacccgggaggcagaggttgcagtgagccaagatagcgccactgcactccagcctcggcgacagagcaagactctgactcaaaaaaaattagctgggtgtggtggcgtacacctgtaatcccagctactggggaagctgaggcaggaggatcacttgaacccaggaggcggaggttgcagtgagccaagatcatgccactgcactccagccgggcaacagagcaagacttcacctcaaaaaaaaaaaaaaaaaaaaaaaaaagaatagatgtttcctaggctgactaatggattaaaattccccaatactgaggcatatgctagtcacaagtccgaagttgtagaagaaccagtaactcatgaattggccttagcttgctcttgcacttgcttacttgcttgcttgcttcttacagagggcggatggaataactcaacattccttccttcctccactgcaacacaagttacataggtgatgatgtggtagttgattgatcggcatcccctcagcacccagctcactgcattgcacacagtaagcagttagtaaatgagagcatcaaatcaataccgtgattggtacatacttgattcaataattattgggcacctaccattttgttgcctgcaatacacctttccccttttggtgcagaggcatgagaagaattctgcctgttgccaccctttctgaatgccatttaaaaattcttaactaccttctccaaaccacacacacacaagttatcttcctctcccacactcttgtctctttctctttgtatttcagggtgtctaccagaagatggacccaagatccatggaggctcctgtgactcagatcaactgccctgcccgggaaacctggtctctccggaaaccttgattaaactgctttttctgacacctcttcctctacaacccttgattctatcaccattgaaacttcagaaccaactctaaccatccccacctccaggtgaggggactaatgagaattactgacagcctgatggctacccccaagtcagtttcccttcatactttactacaaatctgaccatgttcccatatttactgagtaaatttgatgaaatttacctagtcctgtgtcctagatgtatcagggagagggaagagaaaggataaaggaagttgagagctgggataggaattagaggcaaagggcttatgtagggagcagagagctaaaattctagtcaggcacctctttctgaggtgatgggggagtatactgggagcaaactcttctagagaaagcatggtgtggtaaaagaaaaccaagcttggattcagaaatcaccatcagcacttgctgtttgaccttaaattcctcatctgtcagattaaaaggtctcggccgggcatggtggctcacgcctgtaatcccagcactttgggaggctgaggcaggcggatcacctgatgctgggagttcgggaccagcctgaccaacatggagaaaccctgtctctactaaaaatacaaaattagctgggcctggggtggcacatgcctgtaatcccagctactcgggaggctgaggcaggagaagcgcttgaacctggggaggcggaggttgcggtaagccgagatcacgccactgcactccagcctgggcaacaagagtgaaactccatctcaaaaaaaaaaaaaaaagattaaaaggtctataaagtccctattaagcaccatgagtataaagggactcaaactgacctctgcagattcttgattccagcttttttgtttttgttttgttttgagatgaagtctcgctcttgtcccccaggctggagtgcatggcgtgatctcggctcactgcaacctccacctcccgggttcaagcgattctcctgtctcagcctcccaagtagctgggattacaggcgcccaccaccatgcccagctaatttttgtatttttagtagagacggggtttcaccatgttggccaggctggtctagaactcctgacctcaggtgatccacccgcctcggcctcccaagtagctgggattacaggcgcccaccaccacgcccagctaatttttgtatttttagtagagacggggtttcaccatgttggccaggctggtctagaactcctgacctcaggtgatccacctgcctcggcctcccaaagtgctgggattacagcgtgagccactgcgcgcggccatctttgctccagctttaaagtggttactccagaggctgaggtggtcagttgagcccaggaggtcgagactgcagtgagccatgattgtacccctgcactccagcctgggcaacggtgagaccttgtctcaaaattaaaaaataaaactgttacagtcatttatcataatagcttcttgttgcttttgcccattaccaaaaaaccatgggccacactagacgatttacataaaatttaactcaacaattgggagcaacactattctcattttatagttgagaaaattgaggcttagagaaattaaataggtcaggcaaggcggctcatgcctgtaattccagaactctgggaggccggagcgcggtggcggtttggtgggggggaggggagggattgcttgaggccaggagttcgagactaccctggccaacatagtgagacccgcccccccctcccgccccccccggtctctattaaataaatatgagaagtttaataattttcccaaaattacatagttaatggcagatccagaatttacactaggtctgtctggttccccagtctatgctcttaagttttgctacttgctgtaaggaccacgtaaaataaaatgtatagttaaagggaaattactaccatttcctgtctggttttctcccactctcgccctcaaaagttcacctgcccttgtcctcaaagccacaggacgcctaattgctatttttgggtttcagctgaaacgccacgggtctgggggatagcgagggtgtgttacattttcggtcttccggtcagccggaaccactcacaccgctgctggtgctgtgtagggtgtacctcttcggagttcctggaggtggtgccagactagagtggcagctgtagtaaccaatagacacggactttgttggaccagaagccaatgaagaattacgtggaggagaagcggcgataatctgtttgaggatrtaggcactggtgtgaaggaacatggccctgtatcagaggtggcggtgtctccggctccaaggtttacaggcttgcaggctacacacggtgcgtgaggcacccccaaagctccgatccgcatcagacttagcccagccgaagcccccaaatttttatgttaacccagcctcacgccactcctcctctccctggtcctccgagtccccagaaaaggactcgtatctaaactcgttatctaattctcgagttagcggtctgggggrctctgagctcgaaggacccccagcctagggtcttgtatcacccaatccccttaaaaagtaggaattcggacgaagtccacttaaccatcccaaagtgccatcatctgcaattctaagaaagaatgatgggacgtgtgttacctgctaatatatctttccctccaggcagttgtgtcgacycctccacgctggttggcagagcggcttggcctttttgaggagctgtgggctgctcaggtaaagagattagcaagcatggcacagaaggaaccccggactattaagatatcacttcctggaggccagaaaattgatgctgtggcatggaacacaaccccctaccaactagcccggcagatcaggtaacaggcccatcctgtaactaccaggattatccttctgcccctttactttctcttcacttgagcaggggaagaaaacttggtctgcttgtttctgttccgtccccattaagatagcctttcctgaagattttgtttttgttttttgttgttgttcttttatacagacggggtctctccatgttgcccaggctagtcttgaactcctgggctcaagcgatccttccatctcagcctcccgaagtgctgggattacaggcatgagccaccaaacccggcctgagatttgttttatctgtattagtttctgcmtcagagtctctgkcctttcattggggaaagaaatgaaagcttctgttgctctggtaactcatttcacctttgcaagtttacagttgctgagagatgagcaactttctccccactgtggattgtaaccctgtctgttttaaatcattaatttactttttaataattgatacataataattgaacatatgaatgggtatatgtgatattttgatatatgcatacaatatgtaatgatcaaatcagggtgttcaggatatctgttaccccaaacatttatcatttctttgtgttgggactatttcaaatcttctagctattttgaaatatacaataaattattattaactgtattcacccaactctgctatggaacattagagcatattccttctgtctaactctatttttgtacccattagccaacctcttcatctcccctcccccatcctttccagcctctggtaactatcactctattctctaccactgtgagatcaactttttaaactctcatataggaatcagaacatgtgatattttcctttttgtgccttgtaaccctgtctttttcttcatccccaccttccactgctgaagttcaacactggcagatactgcagtggctgctcaagtgaatggagaaccttatgatctggagcggcccttggagacagattctgacctcagatttctgacattcgattccccagaggggaaagcagtaagtttctttcttatcaggaatacagtgactactaaaccaagagatattgaagcaggaaattctaacattttattcttttgccgcagtttctccatttgcagttgggagggagacctaccacagactgtcttgactatttctggttaggaaacttatggtgaaagtttttaacttagcttcgatctattaagcaaacatttgtgctagtgagagggagagagatgatatgttgaaaaaacgaaaggataaatatgtaaattcagccccctcaactcttgagcacgtacattataagtcatctgtagtgtatattcaattctaacatggcttatacagctgagcaaacaacctggtcacctccccaccttgtcttcttcatgtcagctcaggtagcacagaccttgcctattaggatccagaaaaatagagttctcctgccatctatgtgtaaatagtgaccaaatccaagaggaatatatcgcactagattcgtgggacagaaaaaaataggactaaaagacsaaacagagacctaagtaaccactgtgttaagaagatagcttattctggccaggcacagtagctcacgcctgtaatcccagcactttgggaggccgaggcaggtggatcatctgaggtcaagagttcaagaccagcctggccaacatagtagaaaccccgtctctactaaaaatacaaaaattagctgggcgtggtggtgagcacttgtcatcccagctaattgagaggctgaggcaggagaattgcttgaaccctggaggcggaggttgcagtgagctgagatcgcgtcattgcactctagcctgggcgacagagcgagactccgtctcaaaaagaaaaattattctgaagccctaaaagcttacaggagcagcagaagactgactggcctccagcttctatgctttggaactgggaagaaccaaggattgaggggtggggctggagcttctatgcactgaaagaagaaaaaatactggccttctttcttttctattcagtcttttttttttttttttttttttgagatggagtctcactctgtcacccaggctggagtgcagtggcgcgatcttggttcactgcaacttccacctcccgggttcaagtgattctcctgcctcagcctcctgagtagctgggattacagacacacgccaccatgcctggctagttttgtatgttttagcagagacagggtttcaccatgttggccagactggyctcgaactcctgacctcagatgatccgcctgccttgacctcctgaagtgttggggttacaggcatgagctgctgtgcccagcctttttttttaagcttgttactttttagtggtcacccccaaaatctaggatccccattttgtggtagttattcctagaagaaccataccggctttcctaccagcttttgtgaggaagagctcagagatctaggggttaagggagaagtttatgaacttgtgaaccccttttttgtgaacccaggtgttytggcactccagcacccatgtcctgggggcagcagctgaacaattcctaggtgctgttctctgcagaggtccaagtacagaatatggcttttaccatgatttcttcctgggaaaggagaggtgagtaatgaaaggaaggaggagaatgattctgggatggtttctgaggctcttttcaggggccttgggcatgctccatttggatgaggaagctggaggagaagggtttctctaggtctcaactatgacattagtatctccttctgtgctagtccatgtccctcttctaactttgcttgaaatttaccttcttggctggtgcacatgtagtcccagctacttgggaggctgaggtggaaggatcacttgagcctgggaggttgaggctgtggtgagccatgatcttaaccactgcacccaacttgtgtgacacagcaagacactytctcaaaaaaaaacaaaaagaaaaagaagaaacaacttactttgttacttgttagctttcataaattcaagttttacttaatcgccctcattactattgttctaactttgtctatccagatttcctgcattcaacttttaacttcatgcatagagctttttctccagctgtaatatctgttacctgatatcctatttatattttctctgagtttgtctgtctttgcctataactctagatttctsttgaaggacaggaccttacccgctagccaacaggtgtgtcacccaggtgattgatgcacctcataggatgcaacccaaccaattctcctctttccaggacaatccggggctcagagctgcctgttttggagcggatttgccaggaacttacagctgctgctcgacccttccggaggctagaggcttcacgggatcagcttcgccagttgttcaaggtggggtggagggaagaggtggctcttccaggacatctttgtgggaataaacacttttcttcaatctcccttctacctttttccaggataacccctttaagcttcacttgattgaggagaaagtgacaggtccaacagcaacagtatatgggtaagagttgtcaagattaaggcaaacagagaggtggggaagcattgaagaaggccagaaatgcgataagggaagaaagatagaaggtaatttgtgttgctccagaaaaagaaatgggaatgggaattgattttttttttttctttttttgagacggagtcttggtctgtctcccaggctggagtgcggtagcacgatctcggctcactgcaacctccgcctcctgggttcaagtgattctcctgccttagcctccagagtggctgggattacaggcatgtgccaccatgcctggctagtttttttttttttttttttttttgagatgaagtcttgttctgtcacccaggctggaatgcagtggcgcgatctcggctcactgcatctctgcctcccgggttcaaacaattcttctgcctcagcctcccgagtagctggaactacaggcatgcaccaccatgcctrgctaatttttatatttttagtagagacggggtttcaccatattgtccaggctggtctcgaactcctgaccacgtgatccacccaccttggcctcccaaagttctgggattatagacatgagccaccgcgccctgccagggaattgatttttatctgccattgccctctctcagtaggacagttcctttctcttcacctcttctgtcagctaaagaccatgagagggagaaagctagaagctgaagattctgaaaatcactaactggcctcttctttctcctaggtgtggcacattggttgacctttgccagggcccccaccttcggcatactggacagattggaggactgaagctgctatcggtcagttgtgggacagagttaggttaagattcctattttgagccgggcatggtggctcacgcttgtaatcccagcactttgggaggctgaggcagatggatcataaagtcaggagtttgagaccagcctggccaatatggtgaaaccccgtctctactaaaaatacaaaaattagctgggtgtggtggcacacacctgtagtcctagctgctcgggaggctgagacaggagagttgcctgaacctgggaggcggaggttgtagtgagccgagactgcactactgcactccagcctgggcaacagagcgagagtccatctcaaaaaaaaaaaaaaaaaaattcctggtttcactgggatgagcaggagaatcggaaggtgatactttctgtcggcaccccccttttttttttttgagaccaagtctctcggtcgcccaggctggagtgcagtggcgcgatcttggctcactgcaagcttcgcctcctggattcaagcaattctcctgcttcagcctcccgagtagctgggataataggtgtgcaccaccatgcccagctactttttgtatttttagtagagacagggtttcaccatgttggccagggtgatctcaagtgatcttcccttctcagcctcccaaagtgctgggattacaggcatgagccactgagcctggccctgtactctcataagctgagcggggaatacaggagaaagaaactttgtccccacattctaaaaacccgtttgatggcacacactggacagcctgctagggcccagaagccaattcagatgccctaatatgatgtcagtattaaggggggtggaggggtggagcaggagggtgtgagcaagctggatgggtcatacagggaagggttgtagagagagggggcgtggtccaggaggaagatgaacaccatttgacaggcacagggaaaatacctttagtraagggcatgctttttatgaaaataccgttctgcatggtggctcacgcctataatcccagcactttgggaagccgaggtgggtggaccacctgaggtcgggagttcaagaccggcctgaccaacatggagaaaccccgtctctactaaaaatacaaaattaactgggcgtggtggcacatgcctgtaatcccagctacttgtgaggctgaggcaggagaatcacttgaacctgggaggtggaggttgtggcgatccaagatcgtgccattgcactctagcctgggcaacaagagcaaaactccgtctcaaaaaaaaaaaaaagaaaagaaaatactgttctggacaagaagagttactagatggaatgggatgagttacaagggagcaaggggaaatgcagatgtgtagagcaaaaagctctgaacttagactgggcatggtggctcatgcctataatcccagcactttgggaggccaaggtgggtggatcacttgagatcagcctggccaacatggcaaaaccccatggcgcggtggccttgggtaaatcttacttattttccccatctataaaatgaggctattaattcctttttgtcctaccagtaaattcacctcataaagataatgaaaacyaggccaggcatggtggctcacacctgtaatcccagcactttggggagggtgaggcaggcggatcacttgaggtcaggagttcgagaccagcctggccaacatggtgaaaccctgtctctactaaaaatacacaaattagctgggtgtgctggcctacgcctgtaatcccagctacaaaraaggctgaggcaggagagtcacttgaactctgccaggaggcagaggttgcagtgagctgagattgtgccactgcattccagcctgggccacggagcgagacaacatctcaaaaaaaaaaaaaaaaaaaaagataatgaaaaccaactaattcaggaaaaaggaaaagttaaaaagtgctgtaaaatacagactgtcggccaggtgcggtggttcacacgtgtaatcccaacactttgggaggccaagttgggcggatcacttgagctcaggagttcaagaccagcctggccaacatggtgaaacctcgtcactactaaaaataaaaaattagctgggcgtggtggcatgcacctgtagtcccagctactcgggaggctgaggcaggagaattgcttgaactgggaggcagaggttgcagtgagccaagattgcaccactgcactccagcctgggcaacagagtgagactctgtttcaaaaaatatacatataggggctgggcgtggtggctcacgcctgtaatcctaacactttgggaggctgaggcgagtgaatcacgaggtccagagatcgagaccatcctggctaacaccgtgaaaccccgtctctactaaaaatacaaaaaattagycaggtgtggccgggcgcagtggctcacgcctgtaatcccatcactttgggaggctgaggcaggcggatcatgaggtcaggagatcgagaccatcctggctaacacggtgaaaccctgtctactaaaaatacaaaaaattagctgggcgaggtggcgggcgcctgtagtcccagctacttgggaggctgaggcaggagaatggcgtgaaccctggggggtggagcctgcagtgagccaagatcacrccactgcactccagcctgggcgacagcgagactccgtctcaaaaaaagaaaaaaaaaattagtcgagtgtggtggtggtggcctgtagtcccagctacttgggaggctgaggcaggagaatggcgtgaacctgggaggcggagcttgcagtgagccgagatcgcgccactgcactccagcctgggtgacagatgtatatacacacacacacacacgtatagactgtttctcattagtactgtttaacagttttattttatttcatttttatttttttgagacagagtcttgctctgttgcccaggctggagtgcagtggcctgatctcggctcactgcaacctctgcctgccaggttcaagcaattctcctgcctcagcctcctgagtagctgggttacaggcacgtgccaccacacctggctaatttttgtatttttagtacagacaaggtttcaccatgttggtcaggctggtcttgaactcttgaccttgtgatccacccacctcagccccccaaagtgctgggattacaggtgtgagccactgcgcccggcctctcattagtacttttttgtttgtttgtttgtttgttattttttgagatggagtcttgctctgtcgcccaggctggagtgcagtggtgcgatcgcgactcactgctagctccaccttccgggttcatgccattgtcctgcctcagcctcccgagtagctgcgactacaggcacccaccaccacacccagytaatttttttgtatttttagtagagacggggtttcaccatgttagccaggatggtctcgatctcctgacctcgtgatccgcccgcctcggcctcccaaagtgctgggattacaggcgtgagccaccgcgcccggctcattagtactgttaaaggagagagcaggcagaggcttttggatttcatgtggccaggaatgggatatggtatagaagaytgacttttctagcagctgtataggatattgataaatggaggaatagactgacatttgaccagagcttatggttattcctctaagcagtcattgattagaatgggaaggaactaagtaaaggggtaatgagaatggggagaaaaagagatggcaaggtaaggttaggcctgaccaggttgtatgtaggaattaagagtcaggcaatttcaacactttaatctagaagaatggtgtctagaggatggaggtgttcatcctactggtgggrttgttgtcaagaggcatacctgtgacacttaacactgagagtatcatttgagtcttgaaaaaggtgggggccttcagtcctcatctttcctttgatcccctatgtcctcacacagaactcatcatccttatggaggtcttcaggggccccagagacactgcagagagtgtcagggatttccttccccacaacagaattgctgagggtctgggaagcatggagggaggaagcagaattgcgggaccaccggcgcattgggaaggtacaggaattgggaagatagggagggatggtgataagggttggagagagatgacagaacctgattatgaaattgggagcagattcagtcacacagactgagcagctccgtcagttgttctgagttccaaagccacctccttgcccttgagktgacccaatattgctattcctgaccccaggaacaggagctcttcttcttccatgaactgagccctgggagctgcttcttcctgccacgagggacaagggtgtataatgcactagtggcgtttatcagggtaaggggacccaggtctagaggaaagaagaccagggaggggctgagggactagaagaagctaaggtgtttgtgttaaaagatgggggttggggccgggcacagtggctcacatctataatcctagcactttcggaggctgagccgtgcagatcacctgaggtcaggagttcgagaccagcctggccaacatggcaaaaccctgtctctactaaaataaatacaaaaaattagccagtgtggtggcagcgcctgtagtcccagctactggggaggctgaggcaggagaatcccttgaacccaggaaggggaggttgcagtgaactgagattgagccactgcactccagcctgtgtgatacagtgagactccgtcttgaagagaaaaaaaaaggtgggggggctggtttggaatcataaacataaatattgaaagtgctggtgacctttaatactacaattgtgtggtctgcagtcggggagcatagagatgggacctggtatttaataggttgtggttgcaatcagcatggcctgagggcccaggaagatcacacagctgacaccctacctgctttccttccagttactctgaccttccatgtctgtaccctcctctccaggctgagtatgcccatcgtggtttctccgaggtgaaaactcccacactgttttctaygaagctctgggaacagtcagggcactgggagcattatcaggaagacatgtttgccgtgcagcccccaggctctgacaggcctcccagctcccagagtgacgattctaccaggcatatcacrgatacactcgccctcaagcctatgaactgccctgcacactggtaagctgggagctagggttacaatcaggttgctaaatattaaataatagaaagcaccttggggccgggcacrgtggctcacgcctgtaatcccaacamtttgggaggccgaggcgggcggatcacctgaggtcgggagtttgagaccagcctgaccaacatggagaaaccctgtctctactaaaaatacaaaaaattagccgggcacggtggcgggcgcctgtagtcccagctactcaggaggctgaggcaggmkaatggcgtgaacccaggaggtggagcttgcagtgagccgagatygcgccactgcactccagcctgggtgacacagcgagactccatctcaaaaaaaaaaaaaaaaagaaagcaccttggaaagagtattgggacaccgatttgagcctacagtcttccccctagctaaccatgtaaatttgggaaactcattttacctctttaggtctcagtctccttaaagttgctatctaaggctcctccttcagctcagtgaccatcacagaacagggaaatggtaaacgatgtctgttattgtgttactgagaaatccacttttgaacctcagggctcagactgtgatgagtgggattgacaggactcagtgggaggatgtgctgaggctggagagggttatagcagatggtgcagagaaagtaggcaagcagattgggtggaggagcagtcttcgggggctagtcctccctatggccctgacccctctgcaccccaacctcagcctgatgttcgcccaccggcccagatcctggcgggaactgcccctgcgactagctgactttggggctctacaccgggcygaagcctctggtggtctggggggactgacccgactgcggtgcttccagcaggatgacgctcacatcttctgtacaacagatcaggtggcctttccctggywccaccaaagcttttctaaaccacctttctttctccctatgaacctgcaaacccctgatctttatttgccccctgtatgtactataattcagctacattctacccccagcttgcttccgcttcctctctgtttttgccctttgttttcctcaaactgccagcatccctgatctctagcgggctcacagctcactgacccttatttcctgcccctagctggaagcagagatccaaagctgtcttgatttcctccgttccgtctatgccgttcttggcttctccttccgcctggcactgtccacccggccatctggcttcctgggggacccttgcctttgggaccaggccgaacaggtgagtaggaggtagagaaatagaggcagataaaccactctctggtgggaaggagtggagaatacagtaatcaaggttctcagaggcatctggtgagtgggtcatttgttggggactgaccggatgtgttgcttttgaagtctaagatgatgtattccactcttgtctcattccttcaaaggtccttaaacaggccctgaaggaatttggagaaccctgggacctcaactctggagatggtgccttctatggacctaaggtaagcttgggaccctggttagtgttgtatttatttattttttgctttgttttagtaaatatttaatagatacaaagaatttttttttttgagacagtctcactctgtcacccaggctaaaatgcagtggtgtgatctcagctcactgcaacctccagctccctggttcaagcaattcccctgcctcagcctcccgagtagctgggattacaggtgtacgccaccacacccggctaatttttttgtatttttaatagagatggggtttcgccatgttggccagactggtctcgaactcctgacctcaggcaatccaccccacttggcctcccaaagtgctgggattacaggcgtgagccaccgcacccggccacaaagaaatatttttaaacttacgtaggatataaagaaaaacaatatactttctgccctcttggcatctgcaatctagtgagggctgctgaaggtaaataggccatatcagtgctgcgagatctgtgctgtgtaggtaccaagagagcacgttagctggggttagcattactcggggaggttacaaaaggtgtcctgcaggaatcactttccaatctgaaaggtgagtgttggccaagtaaagatgtgtttcaggagggaacagtgtaggcagaggctggggataaggatgaaaacacatggcagaccaatctgggcaacacagggagaccctgtgtctaccaaaaaaaaaaaaaaaaattagccgggtgcagtagcttgtgcctgtggtcccagctacccagcaggctgagatgggaggatcacctggtcccaggaggtagaggctgcagtgagccgagattgcgccccactgcactccagcctgggtgatagagtgagaccctgtctcaaaaaaaaagaagccaaggggaaaaaaggactgaaaagtgtccactggatttagtaaaaaggctgctggatttcaaaggaccattttcagtaaagtagggcctgagggtggagttagaagatgaataaatgaggcctgtgtggtggctcacgcctgtaatcccagcactttgggaggccgacgtgggtggatcacttgaggtcaggagttcgagaccagcctggccaacgtggcgaaaccccatctctactaaaaatataaaaattggccgggtgaggtgttaggacacacctgtagtcccaactactcagtagcctgaggcaggagaatcgctgaacctgggaagttgcagtgagccaagatcacaccactgcaccctagcctgggcaacagagcaagactccgtcccaaaaagtaaaaataaaacaggctgggggcggtggctcacgcctataatcccagcactttgggaggctgaggcaggtggatcacctgaggtcaggggtttgagaccctgtctctactaaaaatacaaaaattagcccagcgtggtgacaggcacctgtaaacccaggaggcggaggttgcagtgagccgaggtcgcaccactgcactccagcctgggcgacagagtgaggctccatctcagaaaaataataataaaatgaaaaataaaataaatgctatgatgagaggaagtctatttggagggagaagttgttgtaaagggaagttcctggagaggtttaaggtaggattgagaagccttcatagaagggatcaccattgccattgtatccagggtggaaggaaaggctgaaggtagatgcaaggaagtttgtaggcatggtaacaggaagttgaggctcttcccatcccatggtatcaattatctgaattcttcatgaggcaggatcatttgctgaaatgagagtggagaagaggagagttgtcagtgagggggctgaagatatgaagaaaaggctgtgtgcagtggccccctcttgtaatcccagcacttagggaggctgagctgagatgatcacttgaatccaggagtttgataccagcctgggcaacatagtaacagggcatcataataagacctcgtctctacaaaaaaaaattttttttttttttttttttttttttttttattgagactatgtctcgctctgctgcccaggctggagtgcagtggctcgatctcggctcactgcaagctccgcctcctggattcacgccattctcctgtctcagcctcccgagtagctgggactataggcaggcacccatcaccatcaccatgcctggctaatttttttctttttttttttttttagtagatatggggtttcaccgtgttagccaggatggtctcgatctgctgacctcatgatctgcccgccttggcctaccaaagtgctgggattacaggcatgagccactgcgcccgaccgtctctacaaaaaatttaaaacaaattttaaaattagctggatgtgatggtgggcacctgtagtcccagctactcaagaggctgaggtgggaggatcacttgagcccaggattttgaggctgcatgagctatgatcaaggcaccacactccagcttgggtaacagaacaaaaccctgtctcaataaaataaataaataaaaagatagagaaaggaaattactcaaraactgttatatagctaaaatcttttttttgtttgttttgttttatttatttatttttatatatttttttgagatcaaattttgctctgtcgcccaggttggagtgcagtggcgcaatctcggctcactgcaacctctgcctgccaggttcaagcgattctcctgccccagcctccygagtagctgggattacaggcatgtaccaccacgcccggctaatttttgtatttttagtagagatgggatttcaccatgttggccaggctggtcttgaactcccaacctcaggtgatctgctcgccttggcttcccaaagtggtgggattattacaggcatgagccatcttgcccagcgtttttttcgtttttgtttttttccccgagacagactcttgctctgttgccagactgaagtgcactggcggatcttggctcactgcaacctccacctcccaggttcaagcgattctcttgcctcagcctcccgagtatctgggacaggtgtgcaccaccacgcccagctaatttttttttttttttttttgaggcggagttttactctgtcgccaggctggagtggagtggcacaatctcggctcaccacaacctccacctcctgggttcaagcgattctcctgcctcagcctccccagtagctgggattacaggcacccgctaccacaccagctaatttttgtattcccttttttagtagacggcatttcaccgtgttggccaggctggtctcgaactcctgacctcaggtggtccacctacctcggcctcccaaagtgctgggattacaggagtgggccatgtgccttgcctggctaaaatcttttgagtactcaaagttgctgttgactgtgttggggtcttttattcaggtaacatgtgtattctcatttttatgtcccaagtgtttattccagcatatggtatttatttacctgcttcactaagtagttagtaaattaaaatattaacagtaatgaaagtgtgtcttctgatttatttcagcaataacagtaggcaaataaaatatctttattactaagaaaaaaattgagagaggttaaacaatgtgcttaaggttacagatataacagtcataaagtgtgtattatgttgaatcagtctaataagttgctggctcagatactgctataaaaagagagagcaaaaaactggaacatccctgaggagaacagagcatagagcttattagggcaatccaaaggattgctggcagcagacagggaccagctgaatctcgaaatactgacttccatggtggcatcaatctctgcatttgcatctgtgtggtttgtgacatattgggcagcactgagcagttctcttgcagggccaaagatgtaggaggctaaggtgcagaagaacaatgaatggtacaaagggaactagggaaaatggtacagcttcatgggataagaaacaaaggtgggaggggcctgaggatgggagagaaaaagaggagttaaagaaccggtgggttgaagtgccattaataggaataattgtcatggccgggtgtggtggctcacacccataatcccagcactttgggaggccgaagtgggcagatcacttgagatcaggagtttgagaccagccttgccaacatggtgaaaccccatccctactgaaaaaaaaaaatacacatatgtgtgtgtgtgtgtgtgtgtgtgtgtgtgtgtatatatatgtgtgtgtgtgtgtgtatgtgtgtatatatatgtgtgtgtatatatgtgtgtgtatatatgtgtgtatatatgtgtgtatatatgtgtgtatatatgtgtatatatatgtgtgtgtatatatacacacacacacacacacatatacacacacatacatatatatatgttagctgggcgtggtggcatgtacctgtagtcccagctactcaggaggctgaggcaggagagtcgcttgaacccgggaggcggaggctgcagtgagctgaaatcgtgccactgcactcctgtcagggtgacagagtgagactctgtctcaaaaaaaaaaaaaaaaaaggaataattstcagagctggctgaccaagagacagtaatcagagtagggtgtctgatggacagtttcagaggtacagccattgggggagatgacaggataaagggtgtagccatagatgrgtggtggtgaagatctctgagatgaggagctcaaggaattgagaggccagggtgtggacatcaggtaatattataacaccattattagatggagagagctgctgagaactactgccagagtgagttgagtagagtgaactggaggggtagcgtatgatagagctaggtgacatgatgaaggtagtagcccgggatgagggtaggttaaagggtgggatggcacaggtaatggaggatagtggttctggatagtgcttctggcttatctcrtgccttcccatctgtttcctgtagattgacgtgcacctccacgatgccctgggccggccacatcagtgtgggacaattcagcttgacttccaactgcccctgagatttgacctccagtataaggggtataaaaccttgccctatcctcttttcccttgacagtgcatggaataagtccttctgcctttggccctaaaaactaaaccctccacaccctctcctgccagagctgaatatttcttaaaaactggaaggtgatctygggtacacaattygtgatacttccaccattccatccacccccmcctttttcctttcaaggcaggcgggtgccctggagcgtccagtcctcattcaccgagcagtgctcggttctgtggaaagactgttgggagtgctggcagaaagctgcggggggaaatggtgagacctctgacctggatttctgttctggccccaaaccrgatagttatgctccagatcctgtcccccttcatatgccagcctctttccttctcaagtctgctccatacaagcacacttctggccagagccagagtgactaatttgccatcacctgttctttccctaccaggccactgtggctgtccccgttccaggtggtggtcatccctgtggggagtgagcaagaggaatacgccaaagaggtaaggagttgaggtaagggagggggcagaagcaggtccagtagagagtctggtgccctgcagtgggcaggaagaggctgcaggggtggtagaggaaggagcacagccctcacagccacaagactgggctcgagtggctgctgtcctagatgctggaaatcctgtatctaaaaaatgtgactaatgcctaccttgtagagatgtatgaaaattaaacaaattaacaaatgttgaaagccaccaaaagagcacttggcacaaaactgggattgagtacacagttttatttttcctttctagagagaattgaggatatggatggtaccagagtcaaacagctggttgggtagagcagtggctagaaggcaaagtccacggaataactsgggggtcatctccagtaggaggcagaaagattgtggggttggggatgaatggggaggaggcctcaatgtggagatgaaatgaggagaggttgctggtaagaagtggagagccccgaggcagggaaaggaggaacagatgggggcattgagggaaaagagcatcagactgttctagctccttaactttccagtaaattaacttcctgtcaccaaacctctgttgcaggcacagcagagcctgcgggctgcaggactggtcagtgacctggatgcagactctggactgaccctcagccggagaatccgccgggcccagcttgcccactacaattttcagtttggtaagctgaacctcagagccaatgttctcccacctgccgtctgcattcttgctgttaagtttaccaagtctggtaatgcatatttgggttaattggggctcattacctgagcaggtaggagccaggattcaggacacctgactcatttgggccctgtgttccttcacattgccctgccctccccataaccacttctgacactcaaaatagttttcctctttttaactccactctagctgttggtgtctgttaggttaattaaccaagggagcatcagagagaaagggacgggagggttaatacagcgttaattacccttgtttattttagacctagatggaatcagccctaagggatgaggagaaaggccttagggagaaaattctggcactgccatgctccctttttcattttccagggttcagggctctatctcaaaggygaggagcagaaactcctcagccagattacctgattcttgagttttgcacaccccactctccctacaagcacccagagcaagctgtgctgcaatcccagggacttgtacatggcccctttccctcccttaccgcccagtcagcccctgcatacatcctcctcagcagaggcccctcactctgtgaatccagccctaacagacaccaagagccagagtgggactgatgagaggaaactgttctaagggtcagagtggttggggggaggcggggcagtgtgaaggccacaccactcctgccaccttccacttgctctaatacccccttcagacacgcgcgcrcacacacacacacacacacacacacacacagtttctctctgtggggttctcattgtttgtctttctctgcttgactctaatgtctctgacacacacacacacacacacacacacacacacagtttctctctgtggggttctcagtgtttgtctttctctgcttgactcttatgtctctgaccctggggctcttgaccagaagcgataaggcctgcggggactgaagcacttccttgtctcctcaggatgagcaggactggtcatttagtattagcagacacagctgaatacttcctttctrtgaaccatatctgggctctgctcccacccttcctaaagatttaggtctctcaagtttctgcagagcaaaagaaactgttccatgtgggtgaatttgccctgaggttcccaaacttcctctacctgcagtggttggccagaaagagcaaagtaagagaacagtgaacattcggactcgagataatcgtcgccttggggagtgggacttgcctgaggctgtgcagcgactggtggagctacagaacacgagggtcccaaatgccgaagaaattttctgagcctttgtacatagatgaggcaaaaacctgcgagtgccatcagcctccctcacatgggagaccccaacccagctgacaatgtggagcccccagaacttcagaactgtgtggaggcacatgtctgctctcctgaaaagagacttggtttggggaccccacaaaaggagggaagctgtagctgtttggatgtgaggagaatgaaactacaaaaaaaaataaattgggccaggcgcagtggctcatgcctgtaatcccagcactctgggaggctgaggcggacggatcatgaggtcaggagatcaagaccaccctggctaacacggtgaaaccctgtctctactaaaaatacaaaaaattagcygggcatggtggcacacgcctgtaatcccagctactcaggaggctgaggcaggagaatcgcttgaacccgggaggtrgaggttgcagtgagctgagattgcgccactgcacccccctaggcgacagagcgagactctgtctctaaataaataaataaataaataaatacaaactggaagctgctggtcatatgtcttcatctctgactctggagaggtgggataaaaggatgttccactttgtctccctcttttttgtcccagagagttagggaaattgaaaagggacagtccagacctcacactggtaggggagatcccttggataggtttcctgctccccgctgtaaactcctttgtgccctgtttccccaaccccagttcatgagttggcagatcccctctccacagaaggcagcctgtagatggagaaactgaggcacaaactaggggctcaaacacctcttgctcctkgattctctgaatcagtttctcttgaaggtcataagaatgttctcctctaatcagtcccattcttctcaatcctctgaggaggcttcagggtgactttgggaggagtggcttccagaggaggagcagctgggactgagtcatggcaggaagctgaggagggcgggagatcacaccagacaattataaaagaagagctggtcctgaagctcacaaccgtaacagccaccagacaagcttcagtggccggcccttcacatccagacttgcctgagaggacccacctctgagtgtccagtggtcagttgccccaggatggggaccacagccagagcagccttggtcttgacctatttggctgttgcttctgctgcctctgagggaggtgagttgggggatcagcacttaggagggggtctgggcttgcatggcaggggtctgggtccaggcatcccagacggctcatcactagcagagtgattctccgtttggctttccttttctgagcaggcccaaagtgggcctaggccagtggagcctttaaccaaggaggcagagagcaggggcacagaaggagaggggttcctagaaactgctgccaagaaacacagaatcccagtcaaatagacaactgagtggggggtgggttcacagagtgagggtctcctgctgatgaggatgtagggaggtggctggtgggagaggcaagggagggaaaaggggcccccaggctgctcaaaaccggattgctggcccagcaagcctcgactgactccctgtctgattagaggagttgaggggtgtccatccacagacccaccctccatccagcacaaacacattctttatctgctttgatgcctgaacaaaacaggaacccctcaatgctatgggtggaaactaagaaaaaaaggaaaagaaaaggaaaaaaaccacccagggcactcctgcaggaagctgctgaggatgtcagcaaatctgtccacttctctgtgaagccccatgccatcattcttcccagctcctggtcttttgtgtctgcagatcacctacaagtgacccttccctgtgcctgtcccagtcccccaggccctaaattgagacctaaactaaggcggagctgagactggctgaaggggaagcactcaaccttcaggaagcctccttaaccaaaggcctaaagatgtttcaagggcctggagtaggagggtgggtggaggaggtggattgggtaggctccaaccagctcaaggtccagactttttcctctgaaagctagagacgcatcccagcagagactggggaggacaacccacagccctgagggaaagactggcagaggaaatgagggcctccctccccaatcccgtatgccatactccctttaggcccaacctctgagccagtagaggtggagctatcagaccgccacaggctttctcagaacccagctggtcatgtctaggtgtgttggggctgggagaggattaggggacacggggcaggtgaatacagaggggcatctcgtgtcttgcttgtctgtcctacactcttgatctccacagcctccccatcccttgctgaagtccagggaaggccctcccagtggcccctgacttgcccttcttccctccaggcttcacggctacaggacagaggcagctgaggccagagcactttcaagaaggtaagagtttgggggagcagcatgggattgggactccaggaggcactgtgggctctgatgtctcccctcttgcttctagttggctacgcagctcccccctccccacccctatcccgaagcctccccatggatcaccctgactcctctcagcatggccctccctttgagggacagagtcaaggtaaggtcaccatcccatgccctcctcagtgaccctccaggtttctaatctggcctatatcccacttttcaggtggaaaggagggaagaggccctcgcccccactcccagccctggctaggagaaagggtgggctgctcacacattcccccttctatagtgcagccccctccctctcaggaggccacccctctccaacaggaaaagctgctacctgcccaactccctgctgaaaaggaaggtgagcgcttgcccaccctccctcacctctatcccactatggatcctgttgacaccaggctgatccctgctccttggtgccctcacccctatcttgcagtgggtccccctctccctcaggaagctgtccccctccaaaaagagctgccctctctccagcaycccaatgaacagaaggaaggtaagcagctccctctcttctttacccacctttacctcatggccttcccccagagcatgggcttcggggcagacaagacggtgggctctgccactcaccagttgtataaccttgggtaagttacatacttctccaagcctttgtttcttcatctgtaaaattgaggatatacctgttttagaaagttatgtgattagatgtgcaaaaatagcatctattttcacttgcttctctgctgagttcttctttgtgcatgtaaactagccaggctttctctgctagagatggccatcccaacatggcttttgcttactccttctacccagtagacccacctcttccatatcaggaggagataatcatccattccatgccgagagagggtgagtgacagctttggtctgtccatcctcctgccttagtgctcaggaccctggggagaggagcaggaagcccgagccttgagaagcaggaggaggtgggggcaggctgtgagctgacacctttcacacctcgcttctcttttcctttcagttattttaaaaggaagagccacaaattgttctttctcatttccactatatcctcccaaccctttctcctccaccccagattctttcaatcctcccagctcatccagcctttgtgggttccttcacatgtccccgcttcccactgttttccccattccaggaaygccagctccatttggggaccagagccatccagaacctgagtcctggaatgcagcccagcactgccaacaggaccggtcccaagggggctggggccaccggctsgatggcttcccccctgggcggccttctccagacaatctgaaccaaatctgccttcctaaccgtcagcatgtggtatatggtccctggaacctaccacagtccagctactcccacctcactcgccagggtgagaccctcaatttcctggagattggatattcccgctgctgccactgccgcagccacacaaaccgcctagagtgtgccaaacttgtggtaaggttgggttcttgatgccggggggtgtcctttaaccccagacagtatgtgtgttttaagggttagagcactaggcctgggtctggaggaacctcaggtcccgttcactggccctaccctgggcctccccaatgtgccaggggagcagaggacaaccactgtctcttctttatctgcctgcccagtgtcctttcctggagcctgggaggaaggcaggaatgtggaaagtgggctgatcctcccctcttgctctagtgggaggaagcaatgagccgattctgtgaggccgagttctcggtcaagacccgaccccactggtgctgcacrcggcagggggargctcggttctcctgcttccaggaggaagctcccyagccacactaccagctccgggcctgccccagccatcagcctgatatttcctcgggtcttgagctgcctttccctcctggggtgcccacattggacaatatcaagaacatctgccacctgaggcgcttccgctctgtgccacgcaacctgccagctactgaccccctacaaagggagctgctggcactgatccagctggagagggagttcyagcgctgctgccgccaggggaacaatcacacctgtacatgraaggccgtaagtgggcgtcccagcctccctgagagcctgtttgcctgcctgcccatcttcgacctctgatcctgccagtccatccatccatgtaccccccctgctgtgagtgcgtccacccgttcatctgcttgtggctgtccgtccatccattgtgtttgtcacctgagtttgttcatcttgagcttcgtactacacttctggcctcctccactcatgatccacacacgcatctgtctaccatccatccatcsgtccagctctggcctcacctgaccttctccatccactgttccagctcatctcccggcaccagcttggaacctcatccaggcttccacccgtccaccttcccaagcccacacatcaacagttgcctcctaaccctctacttttttgccattccctttgggcctctcgggctgggagcccctcatctagttgccagggacgataagggaagtcgatggtcaggagagaaggggccaagtgtccagcttctgacttccctctctctggtccacagtgggaggatacccttgacaaatactgtgaccgggagtatgctgtgaagacccaccaccacttgtgttgccgccaccctcccagccctactcgggatgagtgctttgcccgtcgggctccttaccccaactatgaccgggacatcttgaccattgacatcrgtcgagtcacccccaacctcatgggccacctctgtggaaaccaaagagttctcaccaagcagtaagttgcctagtccttccccactctcttcctttcccgaaaacttccttttgggacacctttgggaaaagcaaaatcatgatatcccaaccccatctgatgccagaagatgcccaaagaccctaacycctgcccctttcacaccaacatagtaaacatattcctgggctgatccacaacatgactgcccgctgctgtgacctgccatttccagaacaggcctgctgtgcagaggaggaggtgagtgtgtggagtctagtctccagaggaatgcaggggaggggagggaaagagctagaactgcaggccaccccttctctttagtacctcaaaccagcctttggttataatgactagtgggggaggtgtttttttcttggttccagaaaagtcttcactctgacctggcctgctccccatctctaagttcctattatgccttctccgggccacaagcttctggcatttccagatgtacacatytgtcagtcacaaggaatccagctgtgcaaggcaggcttgcactctctctgggccccaggaggggaacgagggagagagcagtagaagctgatgaaagggggactttggcacccaagtatctacatctgtccttggaccacctccccaccccatcatctgttttacttttctcattcatcagaaattaaccttcatcaatgatctgtgtggtccccgacgtaacatctggcgagaccctgccctctgctgttacctgagtcctggggatgaacaggtcaactgcttcaacatcaattatctgaggaacgtggctctagtgtctggagacactgagaacgccaagggccagggggagcakggctcaactggargaacaaatatcagctccrcctytgagcccaaggaagaatgrgtcaccccagagccctagagggtcagatggggggaaccccaccctgccccacccatctgaacactcattacactaaacacctcttggatttggtgtcctcattgtctatctaatgtctcacccgcagtgty

SEQ ID NO: 94465 - DNA, 27508 bp, Homo sapiens
ggcgagcccctcgaatcgttaggcatgctcagtgctgggggttctgggagggttgctgccagcctgacgtagctcatgtctctctgagacaggtgtatctgtccctgcttcggatgtacctgtcgccccccagcattcactgcctggggccaatcaagctggaactactggagccaaaagccaacctccaggccgctctgcaggtcctcgagctacaccacagcaaactggacaccaccaaggtcaggagttgttcctagggagatggagggtgtttgcagggagcaccgaatgagaagaggaaatgtggaaagggactagggtccaagagctccacggctgcagacatttcttcattctcactcctgttcacctcacccagtccctatctctgttcctgtccctaggccctcaaccttctgccagcaaacactcagatcaatgacatacgcatcttcctggaaaaggtcttggaagaaaatgcacaaaagaaacggktcaatcaagtgctcaagaaccttctccatgcagaattcctgagggtaggtatgggccttccaaactctagggtgggcttttaacttttagtatgagacaatgtccacatgttcccttctgaccaaggcagagcctgtacagtgcagctcaagctgatccagtagccagcttgacattgaattgccaatgttctaagcagaagaatctgtgacgactgaaagaggacacagttgctggcctctgcctcctgtttctgggtgccacactgtagaacttcttcctcaatccccctgttcttccaggtccaggargagcggattttacaccagcaggtgaagtgcatcatcacagaggagaaggtgtgcatggtgtgtaagaagaagattgggaacaggtgagcctccttcacacctgtgtggcatctgggctttgtggaggttcccaggggtggagaacgctcaggatggatttctgccctttaacagagaaggagaacatggctgctggctgtcctgacaacttttagttcttgagccttcagagagcagcctgttctatctgttgggagtgggcttcgagaatttaaagacctgcaatgtatggtatggagctgttggattcttgtccataaaactcttcccctcttgaagctagaacctgatatagtgggtgcccaagagatgtaggtctgcagaaagttcttataaggaagatccagtgaaggaagaaaaagatctttcaagctactgcattgtgactcaagtaggatcctgagccagactcatactgtgttaagacatatactctagttagtccccttttcttcaaaggagagtgatttgtctcttatgtagctggaaaaatatttttctttagaaagacaaactcgccgtccttttcagaattagcctgaaacctgttctgatgaacattgttggctctcaggaagccagggctgagctttgggctggtgcactgcccatctttaatatgccttgtgttttgcataataaaaaaataccccatgcactcttaactgtgtgcacctcatcctctgtttggttatttgacagagatgatggctacagaaatccagagcccctcaggcaggctgttctttgaggtttgggtgggctgcttttggaatggccccccagcaatgtgcctcttctgtaggaggtgccgctgccagagaagtggtcacttagaagcagtcctcactcccaagccattttcttccctgcagtgcatttgcaagataccccaatggagtggtcgtccattacttctgttccaaagaggtaaacccagctgacacttgagcccagcatcctggggatccagcrgatggacagcttggctctcccagagaggtgaaggagcacctggccttaggaatcctggctgccaccaccacaaggctccccatttggacattactggctatcttgtgccctggaacaactctgaattaattagactcatggtctggcattgccagctttttaatgggaaaagagattagttataccttataccattatgttgtgggcaattccagagaattcagtacctgcttggtcaggaggatgtgcaccatcttgcctttgcacaccagtcacctgaacaaggaaacttgtcacaagtgtttgtaaccatggggttgttcatcaagggcttttctattaagtacatgacttcacaaggaccgctcagcatggctcactggagagttccatgagagaacagcactcaagcttctggccgcatggacccgatggctcgcattctgtgtagtgttttacgtctccatggtaactgtgccctgcacccctcggtagccgccctgttagttttcagtctccttttctttctcaccatttatcacttccctcactgccctacccaggctttctctcccacttccctgactctgggaataactaatatttaagcaaggtaagatgagaagcaaggggtctcagttctaggaatacagtgctagttgattgtcaggtatgttgtaaatagaccctctttggccatacactccatgcctagatgcctcggagagcatcattctctgcctaggcaaggccctgcatcccttgcctcaggccgggctgagtgtgactgcagctcctgaggatgggcctgccctgtctggggtatgcgtgatccctagatacatgttcccacagaggtgcctgctccgtcttcgctcaccagacactcaggcaggctggcttagtctttgtgcgtggcgattttgtgctctgggccctttctctttttccagccagtttccattcacttgccttacagcctgccctggccgtcactccccagctttgttcagcaatggtgtggttggagagttgtgctgggatagcgcaggaaggtgggtcccggcaacacgcaggggatgagtggacctggaactgacaatggcgtgctgccaagtgttcctgagaggtgtttaggcacagcagaggggacgcggggggcaagaacagcaggacgctggtttaaaaataactcaccgccaaacctgtggagcagtgtggggcatcctgccagaggtgcacaggctggagtttcaggcactgcaggctgatgacacacagggagagtggccctgcctcctgtcctccccggggtttttgcagactcgaagtctcactgcaccagtgtctttgatggtggtgagggtgggtgatggtgcccagcaccaacagttttagtggcctgtccttgacctgccgtggtcctttgtaaactatggctccatgctgtgtgacagatcaacgtgctgatggtaagtagactaggcttccccaggcatgccgtccgtgggggcctgaagagacagtgagtgccattggccccattcgcagatgtgggagactctgctcaggcctgtgaggctgggcagcccttcaccagagttcggaggagcagtgtgtggcgccacgtcccgactggccatacccacacagaagcagtgctgcccggggcctcatctgggccagcttggactctgcttcctccaggagcagcagggaagctctgggccacctccctggatagcaggaacttgacctgccatgtgtgccctgccttcctggccagctgtgcttgttatcttccattctcacaaactgtctttgaagcaatagaataaagaatgtgtgttttctttcctggtatacatacatgatcccatgctcccaagctccattcttccttccctcaactctctgccctccacagagctatggagaaggctggagatgaaagctttgtagtgaggactgataaagatctcatcactgctccttataataaacctaataaagcaagaaaccaagcctatctgggtctcttatttctccctcccgtggagtttgatgaaaataacaatgaaaagatagtagtttagcaaagaacttagaagaataagccaattagtgaccaagaaaaaatgaatataatacttgcattacaaatgccacgtggtacagccagtgtggtcatggctgatgagtcagcagcacagatacggaacacatccatcattacagaattctgcgggacacactggcgtctgggagatccaagtgttttcccccatcatgtagtagcacctggtgcctcttcctgcagcccatgatgaaggaattgggatggagggacgcagaggtgtttgggaagtggagaagtgttggttcactttggccaactccaaagagaaaatgtagtccttgttgtctctgtcccatctggcactaggggcaatgactttattgtgcagtggggccgatgacttccagaagaggatggtacagccagaaagacacatcagtcaggagctagagccccagcctggttctgcccccagctagctctgtgccctctcctcttgtatggatccgcaggtcccctgcatacattcacagctatcaccaactgccagactctcatttcttagagcccaggccaagtcttggcttcacaatccaaataaagcagaaacaggcccttctttggggcctggtcactggcagtcacacattccttttttggggggagtttctggtctgaacttgcccattcggttcattttggagttgaatcacatcttttttggatgttgtatttttcagcctgtgactctaggccttgggaagagtggagatgactgaatcttagttgagggacagaaattctctccctcccacagttcacggcccccgagatcctcactcttcctggagactgtgcctgtctcagccaccttgatggttgtggtccacagaagagcgaacatcacatccatctgcagcctaaggcctacgatggccaaagagaatgctaaagcctgtatatctggtcgctgaaggatacgtagacttgttgtttggcctgtccttatttataaccccctgcccatatgcctgtctgtacctggacactgtacactgacccaggaagcgagcctgggccaaagccacagggagtcatgagactgaatttctccaggatgtggatgggcccgcctcacctctgtcacctttgcgtttctgggcctagcacaggtctggcacccaccaggctcttggtgtttggcgaattaatgagggtggtcaggagagattaaaaacatctttgatgagttcatgtcctttgtagggacatggatgaagctggaaaccatcattctgagcaaactatcgcaaggacagaaaaccaaacaccacatgttctcactcataggtgggaattgaacaatgagaacacttagacacagggcggggaacatcacacaccggggcatgtcggggggcagggggcatgggggagggatagcattaggagaaatacctaatgtaaatgacgagttaatgggtgcagcacaccaatatggcacatgtatacacatgtaacaaacctgcacgttgtgcacatgtaccgtagaacttaaagtataattagaaaatatatataaagagagaaacatctttgatcccagatgaaacactgaagcagagatttctaggcttcagcttaagagccgcagggaaggtgggacttgaagggtggctagtttcaggccttttccacagctggaggagactcttccctgatttgcacttgccagctggtctctgggccagctgtgccagcttcacctagaggtcttgttggaaatagctccggtgtctatttttcacaaacagcccagtgataaccagggcgctgggtttgggaacaagagtgctaaccagagaccccaagagtctcttggagagggactgagctgcctcctgcctggggaaattaagctccagtcacttcctggagcatgtcaaactccacctccagcaggccatccagcctgagtyctctgcagagcaggcagctccaccctcccaactcagtgctgcctgtcacacctgagccagcagtttgtgcaaccagaggagcgcaggcagggttccctgctggggcccgggctgcccagccatgctttgggcactctggccaaggtggctggcagacaagatgctgcccctcctgggggcagtgctgcttcagaagagagagaagagggkccctctgtggaggcactggcgggtaacgtacctgagattacctgggaaacccggactgggggagtcctgggagctgcagtgccctgtgaagactgagaccagccccagccctgggttttgagttggggtgggacctgtttattctagatgacctggcagagcttaaattagaccttggctcttaaaaatagctccctccgattaggaaatggagggttagttcacttgacacttgtctggggtgggttggctttcaccaaggatgcgcgagcctggctgtagagtccacggagctggtggggttgtgaggggagagtttccctcccagtaggcagcatgctgatgttatctctcctaagcccagctgcaatctgctcggtgactcgtcagaccggtaccggccggccggtgactctcggcttccgctcacctgctcgctgcctcctagacggtctttgagcctctgtcagggagcaagcaagggagggggtgtcacagttttctcttttaatatttaatcttctcaagcacaacattagcacagctctcacagctgctcccaagctagagtgggggcgcgagcgtctgaggggagctgcaggtgtgtggtgcgtgacagccatcgttagttcagtgagtccgtgctggatttagatttgaacccagaccrgatgggttccagggtccagacacatcacgaaggtgctgaactcccwatgcctgggacccgccaaggtctycctgctccccggcacagagacgtcagtgaccctatgccaggttgctgctccatgatgggacgaggggaacaatggggcgagggaccaggctcacactagctgactgagtccctggagttctgttattgcagcgggaaacctacccatactatgacctccaggtgaaggtgctgagggccacaaacatccggggcacagacctgcgtgagtgaccccatctccatccttctctctgtcctttccctgcggcttcctcagagctcagctcaggctggctaacagagagtgtgtgtgtgtaagagtatacatgggtgagtacaagtgagagtgcatgtgtgtatacatgtgtgagtrtacgtgtaggcatctgtgcaagtatgtgtgagtgcaagtgtgagtacatgtgtatacgtgtgtgtgagtgcgtgtatatgtggtgtaaacatgtgagtgcgagtgtgtgggaacacgagtgtgtatatacatgcgtgcaagtgtgagcgagtgtgtgagtgcaaatgtgactgcgagtgtgtatacacatgtaggagtgtgtgagtgcaagtgtgagtggaagtgtatatatgtgagtgcgagtgtgtgtgaacgtgagtgtgtatgtgtgtatacgtgtgtgcgtgttgtgtatgtgtgtctgtatacatgacagtgagtrcsagtgtgtgtgactgagtacgagtgtgtgtatatacgtgtgtgtgtgccagtgtgagagtactacacatgtgtgcgtgcatgagtgcaagagtgtgtgtgtgagtgcaagagtaggtggagggactggtgctgaccatggaggtgagggcaggcagggctggaggggacagctgtgcagactcggcctcctccctgtgcctgggagtgccgccctgggtgacagtgtgaggcccgctgtggctacaagtcagcacgcgctctcagggagctttccatgccagtgcccacacagggaggggattttactgcctgaatcaggcagtagctggaattaatggtctgtgctgccatgggatctttccaactggctgccgcaggatttctgttcaggtgaatgggaggtgtgtggaatcaagatggagtgaaagacatcaaggctctccctccacctcctcaccccaccatgccacgtgggcggcttcccctccccactctgctccttccccttctgccctagcctccccaaggaaaccttttcagcaatgagagcttgaggccccggcccctccctgtcctacctgcagtgtccaaagccgactgctatgtgcaactgtggctgcccacggcgtccccaagccctgcccagactaggatagtggccaactgcagtgaccccgagtggaatgagaccttccactaccagatccatggtgctgtgaaggtgagggccagccaggggccaggctgcgggaggggaactcctcaggcagctaccctcctgtcctacctcatgctcggacctcctgcctgccttgtccccagaacgtcctggagctcaccctytatgacaaggacatcctgggcagcgaccagctctcyctgctcctgtttgacctgagaagcctcaagtgtggccaacctcacaaacacaccttcccactcaaccaccaggtgagcccaccagtgctggcggagagcccagctggaggaggggaggcccagcacagggccaccaaagagggggctctggtcrgcacaggccaagcctccaaggcagaccttcctccaccccgcagccctgascctataaaggtctccctctaatacatcttccttgcatgaaaccaaaatatgagctccttgagggctgtgtgttccctcagtcacagctgaattatcaatgtctagaacagcacctgacacatattttggaataaatgaggttctccatggagataccactgcccctcctaygtccatgacaagccacaatgccagtctccccttctagcccctggagccaagcagggctggcaggcaggaacagctctggaggcttttggagccttgaaaaaattggtgctccctccccctccatgtaggattcacaagagctgcaggtggaatttgttctggagaagaggtgagttctggtagagccaacgccctcagagactcagagatttgagtcagggcagctcctaggtgccagtcaccatgtcctgcactggccttgsaggcctggcctggaggcaatggcctggtcttgacacccatctgcwtgttgggcggcaggctcgccccacyccaaaccctgctgtgttcctcatgctctgcccgctgcttcagtcacattatgattgtagaggccatcatgatggggccagatgtattctccatgtattcctcatcctttgcagccaggtgcctgcatctgaagtcatcaccaacggggttctggtggtgagtggggaaggcaagcttggcgctgttctgggctggggggcagtgaggaacccgtgacagggcccatcaggcccagttgcctctgaaggacacccaagccctcctcggaggggagatgtgctagggaggcacctccagagggaaaggacaagaagctgccaggcacttggtggacagcccaggacctcagcctcctactcccacacagcacgttactcacttgggcctctggctgctgagaccaccggagcagccactgtcatggcccctcaactcctccccctttcccaccagcacccacttcctctgagtctggggagaggggctaggtatgaccttgggctgctgtaaaagattcttacccgtgaggcccaggtcctgggagggctgtttcctagaccctgccccaggaactcctccctccctccatcctggatggggccatggctgtttcccagaccctgccctaggcactcctccctctctccatcctggctggggccgtgggctgtctggctcctacaggcctctgctttcctcaggctcacccctgtctgagaatccagggcacgctccggggagatgggacagccccacgggaagagtacggtgagtctgctcagcggccttgggtcttttgccttctctcccggggttggaactactgatgtcaaggaggtgggtctggggcaggaagttcttaaagttttcattgctcaaagccgactaacgatgggatggattgttcactggaggcagtgaacaacctgtccctggaagtgttcgagcaaagaggttgtatccgcccaactattgctctacaacaaacactcacatgatctcagtggcatacaagcagcatttatttggctcacacaactggcrgtcagctgggctgggcttggcgggggtggcccagccctgtgccatgcgtctctcctctgcctcctgtgacaagcccattagcctgggcatgttctcaaggcatcagcagaggaacaagagagcaagcccaactgagtaagcgcttgttaagcctggtcacagcctggccactacctaacatgttattggccaaaacagggttgaactcaaagctggagggcagggtatatagttggcctctttagcgggaggagctgaagtcacatggcagaatgagaatacaggggaaatgaagaactggggttgtcaaacccagtgccacagaggacagccacccaggcagggaagtccagatgtgggatagcagcagtggctgtgtgacagcaaaggccccttccagtgctgacagcctgagcctgcaggatgagtcctgcccagggaaccctgagtgctcactctgaggcaggccctgggctaagcattttaatgtgccttataatcctcctaacaaccctgtaaagcaggcacaatcagtatcctctaattcatgagactgaggcccaaagaaaacacttgctcacgggcacacagccagtaagtagtagagccagggtcaaacccaggtcggtgacactccgcttctctcaaccacggattatatggtttcttcttatgaatagcacgtctccatctcagtccataggccttggcatgaataaaatatcactttccttattttcttgaattccctccccacacttggtcatgtcgagtctccgggcctcatctagtgcaaggaggggctgtagggcagggactcctctggacctctcatccctcagtgtctgctgtcctcgcatactttgggtctctgttgcttccatgttgtgttaggggctgggactcctgggaggctgtctgcggccccctctgcccggatgtcatgtgcagccatttctccctggggtctggcctcctccccagaaagctgctgggaagctgggcagggagctccggagcccacaagcccaccccctcactcctcccagcctgggcctcatcttccagtctgggctagccctccgccgcttctccaggacgtgcatctctctgtacccacgcatcccattcttcctcctcccgcctctacaaaccttcctctcccaacgttctacacttggaaacaaaggccagaacaacttgcagcctactggttttctcttgggccacaaacctccaacacaatgagtaaagaggctgaagtggggcaagcgggaaaccactgcctgaaaactgctcattcttatgataaacatagaatcatctcaaatcatcagccccacaggctctgggcagggcccctctccctccccgctccctgccttcccctccaggcatttgtgtgcttcccacccttcccgagtcccagttctgaccagggcaggctagaggacccaagagtccttccagaggctttctctatgagcagtgctcaagagagagcgggcgataagagctggcatttcctaggggaagagaagggaggggttgctgctggggcgctgccagcataagccgcagagacacagacccaccccctcacctgcgcacccacctgggccctctgctctcaggctctaggcagctccagctggcagtgcctggagcctacgagaagccacagctcttgcccctgcagcctcccacagagccaggcctcccacccacctttaccttccacgtgaacccagtgctgagctccaggctacacgtggagctgatggagctgctggcagctgtgcaggtgagtgcgccgccaggatggtcggtagatccaactcagcccagactggcgttccagggccacgttgggggagacttttcttccctgctggagagcttcttgggtgttttcttttccacagagtggccccagcgcagagttggaggctcagaccagcaagctgggcgaggggggcatcctgctctcctctctgcccctaggccaggaggaacagtgttctgtggccctgggggaggtaaggctctgtctgggtgccagagggacccctgcctgctctctgtgaccaccaagagaggtctggaggagggacccaagagggtggctggatcaggtcagtccagaggtcagttatgatgtccacatcgggccagagatcgcagggcagcaagggctgcaggtgggggagccatttccctgggagaatcctgcccagagaactcagggttggggctgctgtgtctttcagggccaggaggtggctctgagcatgaaggtggaaatgaggtgagtgggactccaggcagaaggcctcttggggctgggctagaagtgcggggacataccccaacgtgctccattctcttgcccaagaagctcaggccgtggggtggggatgacatttttccctccctggttctggtgctggtgggcggatcccttggacctgctcctgtgaaagacctgggctgggcccaaggctctcctccactggacagtcacccagaaccccccaccgccaccccaccctacttgaggcagctccggggacctagacctacgccttggctttgacctctctgacggggagcaggagtttctggacaggaggaagcaggtcgtgtccaaggccctgcagcaagtgctgggattgagtgaggctctggacagtggccaggtacgtaatggaggaggagctggaccccagagcctctaggactaaatcaagtctcttcccttgagaggaccagcatggctaagaggggccagaggaggttggcctgttcacctgagctgtgggcaccatcggcagagctaggaccccatatgggaccagggccaaacggccctggccaaagctggatgtctatgtgggccgccgtaacaaaaccccacagactaggtggcttaaatgacagaaatgacttttctctcagttctaggggctggaagtccgagatgaaggtgtcatcatcagggttggtttctgctgggttccctctcctcttcctggtggagctgtctcgccatgtcctcatgtggcccttcctctgtgcatgtgtgcagagcgtgcgccttggggtctcctcctcctcttctaaggaccccagtcctatcagttgaaggccctacccttactcacttcacctttattacctccttgtaggccctgtttccaaatactgtcacattgggggttagggcttcaacacaggaatttggagggggacagttgagtctgtaatgtgatcaaagggatgtggaggttggggggtccctgggatcctctgggtatagagacagccagcctgtggccaggaggcaggaggaaaggcgtgctgagagagggacttacaggggatcaggaataggctgccggcttcctccaggctgcctgagtcctcaggagacgctatcactgtggcccagcgctgacaaggctagatcgttcattggggcaatatgtatgccctctctgtgctaggtgtctgctctgtctcatccagcactctgaagcgacagcgccttctgtgagcagtggccagggagcattttttcaagacaggagacgaaaagagaacagggaaaagaacaaaaatccagagtggaatgagccaaatcttactgggaaagctaagcaaccaaaagcatggactctgacccctcaggcacctccgatcctgagaccttaaaacctctgggcacctttggtgcctgggggcaggtctaggctgcttgctggcctttgtcactttagctcggtggtgctcaacgggggacaatttagttcctccccaccgcacccctggggacattcatccatgtgtagagatcgatttcattgttgctgctggggaaaggggaggtggagggaggctgctgacttctactgggtagagggggccagaaatgctgctaaacatcctacaacacacaggacagtccccacagcgaagagctacctggtcaagaatatcgagagtgccacggttgagaggaacctgctgtagctgattttggggaatcagatataccttccaggtctatatcttccaggtcgaatggttaagggctatctctggagccatactgcttaggtgtgagagctcatcacttaactgtatgatcttgggcacattatttaaccttcccgtgcctcagtttcaacatctggaaaatggggttctctcttttttttttttttttttgagacggagtctcgctctgtcgcccaggctggagtgcagtggtgaaatttcagttcactgcaagctccgcctcctgggttcacgccattctcctgcctcagcctccagatagctgggactacaggcaggcgcccaccaccatgcccggctaatttttttgtagttttagtagagacggggtttcaccgtggtctcgatctcctgacctcatgatccgcccgcctcggcctcccgaagtgctgggattacaggcgtgagccactgtgcctggctgaaaatggggttctcattgggttgctgtgaggattcaatgagataatacgtgtaagactcttagaataatgtcctacatgtataggcagtaatacgtcaatgacggtggtagtcggagtcgttatccttgttattattgtacccaggtgcctgtagtggctgtgttgggttccgggggtggaacccgagccatgtcttctctgtacggcagcctggcagggttgcaggagctcggccttctagacactgtgacctacctgagtggggtctctgggtctacctggtaagtgaggtgggggcagggcacagggtaaaggagaccccacaaagtgtggggttgtgacctggtgatcttaaggagtccctgaggggctgggatcctgcctcccagggtgttaggaggggcaggaagaggctgagtcccaagcgcccctctgagttgggttgtttgcagggcagcagtgcaagtggtgggggtggagggccactcacagactctgcacccctctctcccgtggctgtgctctcctgcccctgactcaggcacacctccaatccccaggtgcatctccacactctacagggacccagcctggtcccaggtggccttgcagggccccattgagcgtgcccaggttcacgtctgcagcagtaagatgggagctttgtccacggagcggctacagtactacactcaggaactgggggtccgggagcgcagtggccacagygtgtccctcatcgacctctggggcctccttgttgagtatctcctgtaccaggaggtgagagaagagccagaaggaaatacgtaggctcctctccactccttccacccgccccttgcttctgcctcatccctcaggctaagatctgatttacaaagctgttcctgagctctcggctcccctggggccaggagtgtgactccagggtgggctggtaccattttgcctccctagctcctaacccctggggaggaggagcctggtccgcagcgctcagctctgggtgcatattagaatcaccggcgcagcttttcaaacacacccatgcctcggccccccttccagagagagtgattttagttgttctcaggatgttttgaaagtgatttcagcccacacctggaagtgaggcccagcgccacacccacttctcagccaattccgccataactcactccgcctggctgctcctggaacttcagacccagctgcagttccaggcgataagattcggagctgctccccaccaccccgtgtgtggagatcagttgtgggtggatatcacaagtgatttctcatttctaagtaaataatccacgttttctagtaatttattttttaaagaaattggactggcttttcaaggattcctttaaccatgtcaccctgactccctggtgttctgatacgctgttttgaatagtaaagaaggagggagggtgttcccatagtccctggaattgtacagacccactgtgggctccccttggctgcggcctgaagcctgtccctcagagggctgtccttacagcactggccttggcgacccaaagcctctcttgtgggcacaccacgccttgcagggtgccrgccccaggccacggggatggggaatggaactcctgaaaggccaagctgcctcccttctttcctgcccaggagaaccctgccaagctgtctgaccaacaggaggcggtccgccagggtcagaacccttaccccatttacaccagtgtcaacgtccgcaccaacttgagtggggaagattttgcaggtgcctgggtgtggagacgaaggaaggaggtagaggaggtggggaggaggaggtgagaggccagggtgatcagggtacccagaggaggtggttgcacacaggcaccttggagcacagcggggctgctgcttcttcctgtcattgtcaaggctaagattcctgcttgggcacaagcaccgtggtgggaagcccctggtgactttcccttcactcgggcccctagagtggtgcgagttcacgccctatgaggttggcttccccaagtacggggcttatgttcccaccgagctcttcggctcagaactcttcatgggacgattgctgcagctccagcctgaaccccggatctgttacctgcaaggtgagtcgaggctggagggctggggacaggcaggtgccggggccaggccctgacgtggggtgggggcctgcctgtctccttaggtatgtggggcagcgcctttgccaccagcctggatgagatcttcctaaagaccgccggctcgggcctcagcttcctggagtggtacagaggcagtgtgaatatcacaggtgagggtagcgaccccgagcccctcccacaccacattccagcaacagggccctggcagagrcaagaagaatgagggaggggacagagaaggacttggctgtcccactggattcggggaagtcctgaggaaatgacttctagcttagggtgtctagatgcccagaggtatgatcaagccacacctctgagttctctgttctgggatccaattaggtccactckgtgcaggactactgggtattgggttgayactctgtctgcccctcttcagcctggtccttaaatggctcatgggggccccacggtgcagagcacccttcccgcttttctcccctggatcrcttttgctctgttcttcagttcagctcagatgtcattttctcagacatcccttttccactccatccctccaggatgcctgagaatcttaccaccatggtcccctaggaccatgtgcacatccctgtcgtcgtccttaccccggagcattgtcatcatttattctctctttatgtgactttcccccacaagtaggccgtgcacctgggagggccagggcaggtcccgttcaccttcacagccctcatgcctagtgcagtgctgggcatagtaattgctcagtcagtgtttaatggacgaagttctgattggaagctgtagactcaaactttattttaggaagggtgaaagataaattattatttagtaaatgctgtaggcagttttcaaaacatagaggatacaaaagaaaaagtcgtttcaaagtggttcaatgaagcattggtcagaggcttgggaggtggggtcagggaggaggagggatgtggggagggctcactgttggggaggggcacccctgaactataaggaccactgggcaaaggaggatgccactttcccctctatttcactgtcccgcccctgtctagacgactgccagaagcctcagctgcacaacccctcgaggctgcgaacgaggctcctcaccccacaggggcccttctcccaggctgtgctggacatattcacctcccgcttcacttccgcccagagctttaacttcacccggggtctctgcttgcacaaggactatgtggctggcagggagttcgtggcctggaaaggtgggtgctgccttgggtgggagatggggggcttcccttcctgcctgcrcctctggctcactggagccagtgctggctttgggctgggggttgaggtgtggtctcctgctgcctatgggctgatgcggagcgactctaaatactgctggaagctggaaggcagggccaagggcttggggcaggagtctccatggctgtcagagagaactctacagagagaaggcaaacgtgaatgcaaatacagaagcggttgctagcaagagtaactgcattcgtccctgtgcgtacacatgggttccttgcagacacacacccggacgccttccccaaccagctcacccccatgcgggactgcctgtacctggtggacggaggctttgccatcaactctccgttcccactggctctgctgcctcagagagcagtggacctcattctgtcctttgactattccttggaagccccttttgaggtgagctgggaggcagggatgtggggagcacctgcagtgagtggacagaaagggtgagggaggagaggaggggaaagaaggctctggtgagggggactggctgggtgtgtggggattgccctttgtggacggyctgggttccactctgtgtgtgagggagctgccttctgaacrctgttggcagcacaggtctcccagttgcaggagarttgctgagattatggtgggcgtgggaagaggaggccaaagagggtccccaggaatcttctagcctcatccatagaagatcccccagttctagactctgcccattcatgacagatttccccactccagcttggacctgagtctgtggcccctttgttaccatggtaacaacagagccatgagggtcccctctgatgcagaagccctgcagcaagtccctccatctctgctgggtggtggacggatgcccccattcccatgtgggtgctggtggtgctgctggagcagcccttcctttggtctcctctttgtcctgggtccagtgagagcctgggattgactggggattgatgaagcctcttctgacgtggaccttctgtgattgtcgcatgtcaaccttgtgaaactgacatcagcttytaatagggagcagagaggggtgagagaagggaagaccatggtggttcytggaggaccatggcggaatgctgttgaggcagtggatgattgattgttgatcattactgattattgttaatcttcacaacaccactggatggggagcttttttttttttttttttttttttttttwagatggagtctcactctgtcaccaggctggagtgcagtggtgcaatcttggctcgctgcaacctctgcctcctaggttcaaatgattctcctgcctcagcctcccgagtagctgggactataggcacacaccaccatgcccagctaatttttgtaattttagtagagacrgggtttcaccatgttggccagggtggtcttgatctcttgacctcatgatctgccagcctcggcctcccaaagtgctgggattacaggcatgagccaccatgcccggccggaagtttaaaaattttttattttacacatgagaaaccagctcagaaaggagctgtcacctgcctgaagtcactcagctagtcagaaacagagctggcattgaagcctgggcgtgtgtgagtccagggcggcgggagtggccagggtggaggaaaggcagagtcagaggcttgctcctgctcaggtcttgaagatgacagagaagtactgcctggaccgaggaatccccttccctagcatcgaggtgggccctgaggacrtggaggaggcccgtgagtgctatctgtttgccaaggctgaggacccccgctcccccattgtgctgcacttccccctggttaaccgtaccttccgcacacacctggccccaggtaagggaagctccaggcctgggactgacccacagagccctgggatggtgatgggacgctgttctgagggtgggttccctggagaatgtcactaagcacgcctcctggtgggcctgagctggcccctgtggccctctgctccctgggtctcagcgttcagatggggccagcccctcctggggggtctgagagctgagatgtggcccaagcagggcccgcakggagccagccaggtgtcctgcacaaggaagacttctgggctgttccagccagttccacagagggctccatcctggcctctcctctgcttcccccacccacaggtgtggagcgacaaacagctgaggagaaggcctttggggactttgtcatcaacaggccagacaccccctatggcatgatgaacttcacctatgagccccaggacttttatcggctggtggccctcagtcgatacaacgtcctgaacaaygtggagaccttgaagtgcgccctccagctggctctggaccggcaccaggctcgggagagggcaggggcctgaccaaggcaggaagcggaggactgtgacagagaggagacacactgctcatggtcagggcttgtagagggaggagcgatggggactctgtgcaggatctgcttcccttctctccaggacctgcctcgaggtgccccaggccccggaaagctcttgcagaattgcagcttggactggggcagggctctccttgtgtgtttttggagaagatgggcagtagatcgctccagggactcttggggatgtagggcagaagagaacagcactcatttcacagcggggtgtggagagaatcaggtgagccacagagcccaccccagacacagaaggacctcagagggcccaagtcctcagacccacacagaacaggggctgagggcacygagaagccagctgtcctccttacactgagatggaaagcagagatgcatccatccacacttcctgcagagcggcccaagccccaaccccacctcgagctcctggatgcactgctatcaagaacaatgaggggctgaggggatggccagcctatgttgctgactccatcatcctaaccctccttctgccttctggtctcctcgtgcctcctcccagatcacccttctcttcccagcgccctaaagcctgtggggtgatgtcccattctggctgctccaggtgggagatgtgcgcgtgtctccctgccagttacccaggcttcactcttcgaacctggaccacagtctctggtgatgtgtgtagtggccacatcatgcaaatatagtctcaccattcctaggagctaaatgggtgtgtctagwaggggcatcagttcatcgggggagaggtgtgcacctgtatgkggggcaggagggtgtgcaagttcctggaggtgggttactccaaggcatgggcagtgcagagggagcctcgcctgggctcttgcctctttcccagatgcatccaatgggtcttggcaagttttgtttctcactctccctcttctccatttcccctgacccgccagggactctccaaatacctagaacctctctagtgtgggcagccctcagattcgtgaagaggagatcccgttctggccaggccctctccatctggccacggcctctgcagcatatgcctccagtgctgagctgcctaggagcctgcagcagcacttgagaccttgttccttctgccccctgtcccaggggctccctcttggctgcaccccctgctccatgctctctcacacagacacgctgtcaggaacacctgtgctgggaagccttacctgtcctgagtctggaaagaagactagttctggtttccaggttggggaagggtgactggagcccagcctgtgtcttggcctggcctgggatctgcagccctccagctggcatgagttgcgagggctgggggagccagttatttgggctggcatggggtggggacacctcagttctcctctgcctcctcaccatggctgcctgtcacaggccacggcccctccccttggttcagcagtgagaggtttatctgggagtttatctggctcctgctgtggccattgtcatcaacactgctgtgcctgccgtcatcaataacttgttagtaaaaccttcatagggttcacagctcagaactgcacagcgttcacaacttagaatctgtggtgtttcttcagtgcccattagagcctcaggctgtctctggctcctagaaagtcattctaccatctgttttgttcactgctgtatcctcagtgcctagagcagcagttgatacatggtaggtgctcagtaaatatttgataaatgaatgggaacctacattctaagaaatggatcgtcacccaccaaccacaaaaaagcatgcaatgctttcatgattcctaacccatgtggactttttgaagagctgatataaaccacagaccctctcccaagaaaaaggcatacacacacacatgaaaagttgcttacaataaggtctctgcttcagctatgtgatcagcagccccagggttgcagaggccagcgtctgtccccgcaggccagcaaggcttgtgaaggaggcaaacgtgggcttgtgcagagtgggcggggaccttctcacacagaagtgtaggcaatgccacttgtgctcagataaggtttgggaggagactgggacaagatcaagggcagggggcagggggcaggaggctgggctagtgctgtggcccagatattggccagaagtacagggaggatctcagccagggatggggaggctccaacaagactgaatctgggagccacgcagagcaagaagccaggggaggggccgaaggtaacccagccagtttaatgtctgctcctcaggagagatctgagtctttacctcattcccaacccttatctgagatggctggaaataagcttcagggtcctgaaggtgacagagttggagggatttgtctagaagagcaagcatggtttcccttgaagctgggtagaaacacaggagcagggacatcattcatcaacttgtcagagctcctcatgaggcaagggaagaaaaagggggccacaagtgtaggagattggtcagagtggtgggagaagctatagggaaaggagcaggccttctgaaaggttggaaggctctgcatagctttggaggagaatagctaaagacagctgttctataaccctgaggcagagggcaaggagtaggtacgagggagtgtgggggaatttatcttaaacaggcttgtttacttctgttgaccaggaactgacctttgatcatctacgcccatgaccttccctgaaaggggaacaataaatgttaattacctccagtgtttgctccaggcttttggcattgtgcctgcactgaataaaagcaagcagctccagcttctcagggctgcactttggccacttgagctgggcagtcccctagctgctcttacactgcatacctgtgtctgagtacacatttcatccactgctcagccagggtcgctcctcagtgaggaggtatctgagtccttacctcatttccaactcttgtctgagatggctggaaataagcttcaaggtcctgaaggtgacagagttggagggatttgtccagaagaacaagcatggtttcccttgaagctgggtagaaacacaggagcaggggcatcattcatcagcttgtcagagcccctcatgagagaaaaagggggccacaagcctgtcacatagggctgcacaggttgtgcactgcacaacttcaggggatcctgttcacatgaactgatggtgtgaatttgtctcttggagttgtgtgacctagcagccctgggagcacagcctcaactgagtatgaggacagaggctggttcaaatatcaggccccctggttccttcgatgcagctcggcattcacaagaatctcctgcagaaaatcgaagagcaagtatcctttccattccttggatggtgcagcactgggagaagggcctcaggtactggcaggtggctggtgggcatgggtaacccccgccttctctgagcccaggccatgcagctaacattgctcagttggtggtggtaatcagctgaggctttaaatgaaatttccttcatttcagatgaaaccattcttgcagaggagaaaagcagggcacactgcataccctgcaggaatctatctttccctagcacctctgtcctgtaaaactccacagggacacccaacaaacggggcaaggagtcctggaattttctccatgaaggacaggggtctgtagggggctgtcctgggagtcagggaggctgttaaccactagaggtcagggctggggactgatttttttttcctattaggaaagctgaggcacaggaaatattaagcggtgaatgactcactatgttaaaaagccagttactttagtaagatttaggtcttggttttgaaaaagatgtacagttgcttttcgacttacaatgaggttacatctcaacccattggaaagtcaaaaaactgtaagtcaaaccattcagttggggaccatctggataaatatgtaataaaggccactgttttaaaagtctaccaacactaggtggcgagctttggcaaagtaagtggtaaaaggaggcgaagttggagaaagaggaaaagacaaaggggaggaaaatatgagtaaggaagagaagggatggggagctacccagaaggggggccacccgggtggggagaggcaggcaggtgctcttgagagaggctctggctgatttgctggcattcacaagtcctcgtggctctttatcctttgaccccagagtgatggatctcacctgggttgcaccttgaattcacctggggagctttaaatgcctgatgcctgccctggctctgcttggtctactgcggggcatctttgtcatcccaccacccccactgggctcctctggaccatggtggctgaggcttccacaggagggtccaggtggcccttgcttgtgcatcgtctagttcgggttggtaccgttgaagccccttcttgcttttccttcctccctctggcctcagcgcttctgctgtccttgtcctcctgtcctctcttcgggtccctgaacactgccagaatttcctggaggcaccttaagtcctctaagggcctatagattttcagttccatcttgggtaccaggaaacactgtgccatgccccaggtctcctttcactccccaccccaacctctccatttattttaccatcgctgggtttcaaagcaagtcctggggcttgagacacacttgttttctgtttgccatgcttcgtctttctcccccgccttcctgctttctggtttgatttttttcttttcccctctgctggtttgaatgttatgcatcctatttccaccattctggtggttcctcttgtcaatttcattgacgtatcatttatatgcaatagcacacattctaagtgtacagtaagtgtacaagagagtaagtgcacagttcaatgaattctgatttatatacatgtgtaactaccaccacagtcacgatatggaacatttccatcacccaaaatgttatcttgcgttccgtcccagtcagtttccccactcctggccccaggtgactactgatcggctttctcccacaatggatttgtcttttccagagtttcatacaaatggaatggtatagtcgaaaaattattaccttgaaccacttaaaatttttttgacttacaattcgttgactttttgactcattgtgtccagcttctctcactcaacacgttttgcgtttgcgagtcatccctgttgctgtgtctgtagttctttccttagtataactcactaggatgtatgtagatatcccacaatgtttatccattcccctgctgatggaaatttggtttatttccaaatttagcttcattaaaagtcttcttacggccaggtgcggtggctcacgcctgtaatcccagcactttgggaggccgaggcgggtggatcacgaggtcaggagatcgagaccaccctggctaacacactgaaaccccgtctctactaaaaatacaaaaaattagccaggcgtggtcgtgggcgcctgtagtcccagctactcaggaggctgagccaggagaatggcgtgaaccatggagacagatcttgcggtgagctgagatcgcgccactgcactccagcctgggtgacagagcgagactctgtctccgaaaaaaaaaaagtcttcttacttaaacattcattcattcatgcattcattcagagacagtctcactctgtcgcccaggctggaatgcagtggcatgatctttcctcactgcaacctctgcctcccgcattcaagcgattcttctgcctcagcctcccgagtagctgggactacaggtgtgtaccaccatgcctggctaattttcgtatttttaatagagacaggtttcaccatgttggccaggctggtcttgaactcctgacctcaagtgatgcacccacctctgcctcccaaagtgctgggattacaggcatgagccaccacacccagcctaaacttttatttttttaaagtcccattaaaaagtccaccagtctctattgtctctccccaaacaagacaagcatcctggcatgcttgtagcttcctgtttcctgccctatgtgccgctccccaaccacccaaacattctactaatcacctggaatcttatttccagtgtattaaaaactgcaaaatagaaatttttatttccactttacaatatagtttcttgatttagttgcttgtcattgcttcttgtaactcctttctttcttttgcgtttgcttttctttttagtggagtgcaaaattgaatatttaatgaagggtgtgtggatggtaaatattctgactgcttatatgtctagaattctcttttcttgccctgacttatgagtaatagcctggaagagtatagaattcttggttcatgcttgcatatgctcagatgttaatgccttcttgcatttgatattgctgatatgcaatctgatggcagctggagtccccattgcaggtcatttgtctgtaacttttaggactttgtcttttattttatttatttattgttttctgaaatgaggtctcactctgtcacccaggctggagtacagtggcagatgatggctcactgcagcctcaacctcctaagctcaagcgatcctcccacctcagcctcccaagaagctgggcccacaggcatgtgccaccattcctggctatttttatttttatttttaattttgtagagacggggtctccctatgttgctcaggctggtgtccaactcctgggctcaaacaatcctctgacctcggccttacaaagtgataggattacaggtgtgagtcaccatacccggcctgtctttr

SEQ ID NO: 94466 - DNA, 146805 bp, Homo sapiens
  misc_feature (1)...(146805): n = A,T,C or G
acactcgaggcaggggaaaggcttctcccccgtgtgcagcagctggtgctgggccaggtggctccactgagcaaaacgcttggagcaaaggtcgcaggcatagggccgctcgcccgagtgcacgcgccggtggctggccagcagtgaggggtaggcaaagcggcgaccacagtcgtcgcaggcgtgcagcttctcctctgtgtgcgtgctgcgatggatggccagggagccgctccgccggaaggcacgcccacagtctgggcaggggtagggcttctctccggtgtgcaagagctggtgctggagcagcgtgctgcgctgggagaagcgggcctcacagtgctcgcaggcatagggacgctccccagagtgcacacgccggtgactgaccaggcgagaggaggaggagaagcgccgctcgcagtccgggcacgggtagggcttctcgccygtgtggatgcgctggtggatgacgagggccgtgcgctggcggaagcggcggttgcactcgaggcaagtgtagggcttctctcccgtgtgtgtacgctggtggatggctagcagggaggggtaggcgaagcgacgtccacagctagggcactggtggggtttttcrcctgtgtgtgtggtccggtgattggccaaggaccggctcctccggaagcagcgaccacagtcagggcagtgatagggcttctcccctgtatggatgacctggtgctgggagaggttcttgcgctgggagaaacgtttgccacactggtcacaaacataggggcactcgccrgagtgtgcccgccggtgactgaccagcagggatggataggaaaagcggcgcccacagtctgggcaagggtaaggcttttttagattctgggcgcacttgtggctctccagggcctgatgatcagggaaggtacagccgcagtcagggcagatggggcccccggacgtctgcctaggaatcagtcggggtttgctgggcctccggcctcgcttcccctttcggggtgcctccttaggcgggaatacttccttctccccattcttctttctggttctgctttctatagaaatacagaagcattaatttaacaaatactgggctcctgctcttgtcaattacattataggttacaagaccaatagactcaccccctggtctcaattcctagtgccacagacagctaagtgtgacatactgtcatgcaaatacggtgtgcattacaggagcttctaacccagcttggagaagtctaggaagatttctcggagattaaactaactttaaaaattgaggccgggcacagtggatcacgcttgtaatcgtaagcactgggaggccgaggcgggcagatcacaaggtcaggagtttgagagcagcctgaccaacatggtgaaaccctgtttctactaaaaatacaaaaattagccgggcgtggtggcacgcacctgtaatcccagctacccagaaggctgaggcaggagaatcgcccgggaggcagaggttgcagtgagccgagattgtgccactgcactccaacctgggcgagagagcgagattccatctcaaaaaaaaaaaaaaaaggaatatttttgaagaggtaagcttacatcattcaaaagtcaaaatatcagccaggcatggttgctcatgcctgtaatcccagcactttgggagcccaaggcaagagatcgcttgaacccaggagttcaagatcagcctgggcagcatagtgagaccccatctctacaaaaaatacaaatattagcctggcctggtggcacgcgtgcctgcctgtagtcctagctacttggaaggctgaggtagaggattacttgagcccaggagttcaaggctactgtgaaccatgatggcaccactgtactccagcctgggcaacacagcaagaccctatctcaaaaaacaaacaagtcaaaatattaataaaggaatacagagaagtcttgctgccacctttttccaatctaccttgtagaaaccatattagttttttcccatttttttgatgcaatacaaatgtcaccttccctatctttctttcataagagattgcatacacatgctttacagcgtatgttctcttccccacctttctttttttttttcttttttgagacagagtcacgctctgtcacccaggctggagtgcaatggtgtgatctcagttcactgaaatctccgcctcccgggttcaagtgattctccctgcctcagcctcctaagtagctgggattacaggcatgcaccactatgcccagctaattttttgtatttttagtagagtcagggtttcaccatgttggccaggttggtctcgaactcctgacctcaggttatctgctcacctctatctcccaaagtgactacaggcgtgagccaccatgcccagctcacctttcttatacaaaagacaacatatacacaccttatacacactttacattttttcacttaatatattctaaagatcattttatgtcagcaaatcttttttctattttacagctacacagaattccattgtggatggtttatttgacttagctgattctttaaaaaatgtggctgggcgtggtggctcatgtctgtaatcctagcactttaggaggctgaggcaggcggatcacctgaggtcaggagttcaagaccagcctggccaacatggtgaaaccccgtctctacaaaaatataaaaattagctgggcacaatagcaggtgcctataatcccagctacccagaggctgaggtgggagaatcacttgatcctgggaggcggaggttgcagtgagccaagatcacgccattgcactccagcctgcatgacagagtgagactccatctcaaaaaaaaaaaaaaaaaaaaaaaaaagaattaaaattatgcagtgttagaaacgtaagtcccagccaagcgcagtggctcattcctataatcccagcactttgggaggccaaggtgggcggactgtgaggtcaggagttcgagaccagcctggccaacatggtgaaaccccgtctctactaaaaatacaaaaattagccgtgcatgctggcgggcgcctgtaatcccagctacttgggaaactgagtcaagatgattacttgaaaccggaaggcaaaggttgcagtgagccaagattgcactactacactccagcctgggtggaagagcaaaactccgtctcaaaaaaaaaaaagaaaagaaacataagtcccaaggctcagtgtacagtgtgcacaggccctaagatcttcttagacacaaagtgtaaaagcaagacaggctgggcgcggtggcttacacctgcaatcccagcactttggaaggccaaggcaggcggatcacctgaggtcaggagttcgagaccagcttgaccaatatggagaaaccctgtctctactaaaaattagccgggtgtgatcgtgggcacctgtagtcccacctactccagaggctgagacaggagaattgcttgaaaccgggagcaagaggttacagtgagctgagatcgtgccactgcactcctgcctgggcaacagagcaagactccgtctcacacacacacaaaagagtgtaaggcaagatatggaaacctatgaggtatgagctagcagtgactgggtcaaaaggccctctaagccaatggttctcaaactccactgtgatcagaatcattgggaggatttactgaaacagaatgccaggccctagtgcccgctttggattcagcaggtctggggtagggtccaagaatgtgcatttctaacaagtttccaaataatgctgcttctggtctgagaccacgctttgagaaccactgctgttagcattgttaaagaccttggactgtattttacccaatggttttcttttctttttttttttcccccaagatggagtctcactgtggcacccaggctggagtacactggcatgatctcggctcactgtaacttccacctcccaggatcaagcaattctccctgcctcagcctcctgagtagctggaattacaggcgcccaccatagtgcccggctaatttttgtatttttttagtagagacggggtttcacgatgttggtcaggctggtcttgaactccggacctcaagtgatctacccacctcggcctcccaaagtgctgggattacaggcatgagccaccagccggccggttttcaaacctagatgcacatctgaatcagctgaggctatttaaaaaatggaagttcctaaacattcacacgagtgaatgaatagctctgggatggggtcctggaacctgcgtttttaccaagttccccaagtgatttagatataaccaatggccatttaacaaccttggcaaaaattaactgaaaagttttaagcaaggaaatatcatggtcagatctgaatcttggacagctatccctggtcttgaagaatctggctctgaaattccagcccagacagctccatcttctactatgggtggatctgggacccttctacctgaatggggttaagcagagccttgttggattctgaggagattgcagtatgtccttcgctgataagggtcatcctgccgtaagagcagaaagaggcccctgcatcccaggcagctgttccccatgagctcccttcaaccaaaacccagaaaactctgagaagtttaggatctctttggtccaactcaaaggtggctagaggcagagatcctggaaaggaggcagagggtagcacctgttaaaagctcactgattctggctggctgcaatggctcacgccagtaacccctgcattttgggaggccaaggcaggaggatcgcttgaggccagaagttcaagaccgaactgagcaagacaatgtttctacaaaaaaaaaaaaaaaaaaaaaagacgaagaataagcccactgattcattcacacagtggaaaactgcagcttgcagactgacataggaatctctgtgtggtggaccggccccacaccaccagacacaagaggctgggaagatgaatatactaaatacgcggcacccacccctagcccaaccaaaactctggacagagccgttagaggtagaacgttataggagggctgcaggctctgcgtggttatttagcactcacttctctggactgttagccctctcgggtactcctgcggatctagagcagccggttcccagtcatcggtgtttcgttccaaccaggagatgagggctggtttgggacctgcgcaccctggggaaagagaacaaatcagaaggccagctcctagatcacgccgagtagtatctccccgacggcacctcctgctaagcccctgcccacctcccctgacaacctggtcgcctgccaggaccgtggcctccctgcctacaccctctccggctcctgcatcccttcgcgccccgcggcagcggatggggccggcctcaccgagcgcgcccaggtgaccgtaggtctcccgcatcacgtcccggtacagggccctctgcgcgggccgcaggcagccccactcctccggggagaagtacacggccacgtccacgaacttcagagccctcggcctcctgccccttttccgactgggtctggcctttcctggtccctgcgcagggagcggagccgaaggtggcgccatgggacccgagaagccggcgccacggccttccgtgtccaggcctcggccctcgggcgctggcggcccctgggatcgaggagcccctgccggaccagggctgagcgtggccggggaggcccggagggaatcggaattggtcgcccgcggggctaacggaaaccttttgctgttattcaggaaactcctgcccgaacttgggtgaaaggcaccggaagatgccttcggggaaaatggcggcgctgctaccgcaccgcctttgcctggaacacaggcagcttccagctatcgattttattgaccggagcgccatgccggcttcctaacctctttgccctcaagtgtaatggcgctgcgattgggcttcacgccgtcttttttcccctccccaatacgcgcgttcattggacgagagccgaagatcgagcgttctgattgggtgctagcaaaggcggtccgtttgaacgaagccaagagctgcataagggcaggaagctggactgctaggatcaggcgactacaaggagttgtgaagcgacttgcaccgacctgggggcagcaagaggccccggggctgctttccgctgttcgactctggcaggctcagccaatcactgaaggagggaacgatttgagcgatggagccactctggccgagttagagctgagattatcctgagttccttttactggtgttctcagagcatccttgactttggagaatggttatcttctttgtttgccctttaggggagggaattatggttagcatttcctgggggcaggcgccatgcccagcatattacatatttcatctttattattttttatttttattttatttatttatttttgagacagagtcgtgctctgtcgcccaggctggagtgcagtggcgaaatctcggctcactgcagcttccacctcccacgttcaagcgattctcctgcctcagcctcccgagtaagtgagattacaggcgcgtgccaccactcctgactaatattcatatttattagcagagatggggtttcaccatgttagccaggctggtctcgaacttctgacctcaagtgattcacccacctcggccccacgaagtgctaggattacaggcgtgagccactatgcccggccttatttttatttttttgagacagggtctcactctgttacccgggcgggatggaatgcagtagtgcaatctcagctcactgcagcctctaactcctgggctcaagcaatcgtcctgcctcagccttcagagtaactgggactactggtgtgcactaccacgcctggctaattttttatgttatttgttgagtcagggtttccctgtgttgcccaggctggtctcgaacccttaggctaagtgatcctcctgcctcgtcctcccaaagggctgggattactggcataagccacagcaccggagccattagttattcgctttttttttttgagactgggtctcattccgttgcccaggctggagtgaaggcatgcacccacagtgctctgctaattttttgtatttttggtagagacggtgtttcgccatgtttcccaggctggtctcgaactcctgagctcaagcaatccgcccacctcggtctcccaaagtgctgggattacaggagtgagccaccacacccagcccgttattaattctttactagcattttgtgaaccaatggttatcatcctggttctactaatgaagaaacgatctcagagggattccatgagtttccagggccatactgctagtaaggagtggggaataaagatttaaacctggggcagacagagcctttattcataccactgataggcatccttccttcacagtatcctaatttgcttgctaaaccaggaatccacctgagctcttgttttcttctcaagttcaatattctgcataatctccctacattattttcacgtgacatttgttcaacgtacaaagcatagtgctaggcaattgggagagcgtacataaataagtcataggccatgctttgaatggagcttacagtctagtaaagcatataaattcacaatgaatcataacagaatgatacaagcatgtatgtgaaaggcactgaactgaaaattgctgatggaacaagccagcacccaccccattagcctccacattttttttttttttttttttttgagacggagtctcgctctgtcacccaggctggagggcagtggcgccatctcggctcactgcaagctccgcctcccgggctcacgccattctcctgcctcagcctcccgggtagctgggactacaggcgcccgccaccacgcccagctaattttttgtatttttagtagagacggggtttcaccatgttagccaggatggtcttgatctcctgacctcgtgatccacccgtctcagcctcccaaagtgctgggattacaggcgtgagccactgtgcccagccctttttttttttttttttagacggagtcttgctctgttgcccaggctagagtgcagtggtgcaaactcggctcactgcaaccttggcctcccgggttcaagtgattctcctgcctcagcctcccgagtagctgagattacaggcacccgccactttgctcggctaatttttgtatttttagtagagacgggatttcaccatcttggccaggctggtctcaaactcctgacctcatgatccaaccacctctgcctcccaaagtgctgggattacaggcatgagccaccacgcccgccctagcccctacttctatgtatgtgttatactgcagagtttcaccagctcaatgccacccccaagggtcctgcgagcaggagaatacaccatttgccatgtctcttagctagtgacatgcacatctatctctctaaccctttaatcaatattgtaaagcatatactatgggcaaaacactaacctcaaagctttcaaggaataaagacaaacaatgtggcaggaaaagtcacaaaattagaaggcaatgaggccgggagcagtggctcacacctgtaatcccagcagtttgggaggccgaggtgggtggatcacgtgaggccaggagttcaagaccagcctggccaacatggcaaaaccctgtctctactaaaaatacaaaaattagccgggcttggtggcacatgcctatagtccctgctacttgggaggctgaggcatgagaattgttttctgttttgttttgttttgttttgttttgagacggagttttgctcttgttccccaggctgagtgcaatggagcaatctcggctcaccacaacctccgcctcccggattcaaacgattctcctgcctcagcctcccgagtagctgggattacaggcatgcgccactacacccagctaattttgtatttttagtagagatggggtttcttcatgttggtcaggctggtcttgaactcctgacctcagctgatctgtccgcctcgacctcccaaagtgctgggattacagacatgagccaccaggcccagccgaagagaattgtttgaaactggaaggcggaggttgcagtgatccaagatggtgccactgcactccagcctgggtgacagagtaagactaagtctcaaaaaaaaaaaaaaaaaaaaaggctgggcttggtggctcacgcctgtaatcccagcactttgggaggccgaggcgggcagatcactaggtcaggagatcaagaccatcctggctaacacggtgaaaccccgtctctactaaaaatataaaaaattagccaggcatggtggtgggcttctgtagtcccagctactcaggaggctgaggcaggagaatggcgtgaacccgggaggcggagctttcgaccgagcgagactcgtctcaaaaaaaaaaaaaaaaaaagaggaaggagaagaaagaagaaggaggaggaggatgaggaggcagcagtgagatattcagaggaaggagatgtttgaacagaggtggtggaaaaaaaactacagttacaggctaggtgtggtggctcacacctataatcccagcactttgggaggccgaggtggggggattgcttgagcccaggagttcaagaccagcctggccaccatggcaaaaccctttctctacaaaaaatacaaaaattaactaggcatggtgtcgggcacttatagtcccagctacttgggaagctgaggtggggggatcgattgagacttgggaggtcaaggctacagtagccaagattgcaccactgcactccagcctgggcgaaagaatgagatcctgtctcaaaaaacaaaaacaacaacaacaacaaaaaaaaaaggcgggagctctagcctcctaattgtggctgggcgtgtgggcatggtggctcatgcctgtagtcccagccctttgggaggctaaggcgagaggatgacttgagcccaagagttcaaggctgcagttaactatgattattacaccactgcgctccagcgtggtcaacagattgagactctgtgtttaaatgaatagaacaaaaacaaacaaacaaacaaaaaacctgggctgcatgaatctgttaagaaaagtcaggtcagctgggcgtggtggctcacacctgtaatccatcccagcacttcaggaggctgaggcgggtggattgcctgaggtcaggagttcaagaccagcctgacccacatggtgaaaccctgtctctactaaatacaaaaaattagccgagagtggtggtgcatgcctgtaatcccagctacttaggaggctgaggcaggagaatcgcttgaaccggggaggctgaggttgcagtgagcccagattgcaccattgcactccagcctgggcaacaagagtgaaactccatctcaaaaaagaaaagaaaagtcaggccaggcacgatggttcgtgcctataatcccagcactttgggaggctgaggagggcaaatcacctgaggtcaggagttcaagaccagcctgaccaacatggtgaaactccctctctactaaatacaaaaaaattaggcgggtgtggtggcacatgcctgtaatcccagctacttgggaggctgaggcaggagaatcgcttggacatgggaggcagaggttgcagtgagctgagatcacatcactgcactccagcctaggggacaaagtgagactccatctaaaaagggaaaagccaagcttttatttctttttttcttttttttagcaggagaagcagatgccacactcagagcaggactgaggcttctyacctgtatgcgtgtgcctatgaatggccaagggagcctctttggtgcacgcaccacacacagtcaaagcaccagtagggcttctctcctgcatggataagctggtgctggagcaagtttcccagtcagcaaggggagtgccacactgtaggcagtggtggcagtgctcacccaagtgcatgtgcctggtggtggccacaagggaggggaatgcaaactggcacccacatctgtgcacacatccgcatatgtgcgtggacagcgccctcctcaggtggaagaggtggctgcagtcggagcccttgcagagctcgtcccctgtgtgggggcagctggtgctggaccaggtgagctctctgggagaattagacactgcatgacccacaaatgtggctgtcggttcgggactgaacaaaggaggacgaacgcagaaatggagacaaagaaaaggatctgttttaaagaaagtgtcgggggctccttgcttctagggaataagggccctgagcttctacagcccttcatatttattaggtagaatcaacagggactaagaggtagtagttggtcagctgcttgatttagcacaggctcacataattgctttctttatacaacaggctccagatgttcctatagataactacaaggaacaactgcacctggtgtgtgactgtcctcagcattccttctggtggcagacgcagttgtcagcttgccaacatcctgcattcatgagaacagtttgctgtttgctcatatagcctccagtggtatactgagttggtcacgaccctcattcttttggcctccaacatctccccctttctgtttttgcattagttgaataaaggtaattgcaggctgtgcagctctcaattgccagctggtggtccagctgattttacagactgtgaacaaaaagcagaaacataataacatttttccaataattacacaaaagacactgaggtgctgtttgaagtaggtccaagggttaaggctctctaaaagttgctggaattctgcccaatattttaaagagggctgaaatgcttgagtttgcttattcaagttaaggattttactttgtaaatcattaatatcaaaaataacactggatgtaaaaagttccctgtaaatgggcctttacaaggttccatggatattcactttgattgtattccaaattggttacacaaatatgagtatggttaaaatgacaatgcaattgctgctgcaactgcaagctttgtacttgttctcctagccacagaacagtagtctttaacattatcccttctgtttgtatctcggtgttaattttattttgaagcatccatgcctggttggctatacacgtccaattttctacatattgagctatttaaatggagttatgcagtgctacggaggacaccacaacagaggttattaatgtgactaaggatactatagcaaaaattatcatgcctaaggctctacgagcacgatgagtaagctgagtaataaggagttttacaaaatgcaaagcaggggcccaaggcttggacagatttacaggaatccataatccgggaatgcgacctagaattattagggtggatatgctgtgtgtttgtattgtgctatgattaaggcaattatacagctgacaggaatcacaagccaattgggcatcgtttacctggagttggtccttttttgctgctagaaaracatagggattaaaaacacaaattgtaggctgggcgcggtgtctcacgcctgtaatcccagcactttgggaggccaagacgggcagatcacgagttcaggagatcgagaccatcctggctaacagggtgaaatcccgtctctactaaaaatataaaaaaattagccgggcgtggtggcgggtgcctgtagtcccagctacttgggaggctgaggcaggagaatggcgtgaacccgggaggcagagcttgcagtgagctgagatcgcaccactgcactccagcctgggcaacagtgcaagactctgtctcaaaaaaacaaaaaaaacacaaattgtaaattgagtggtaatattttctataaaggtaacattaaaactgtgttgagcactattactattattgggtagtgtcccaacccaaatgctgccattcataaacgggagtgccttccatatcgactcctaattggacctctctttccttgataatgccattgaggcaaaggtgggctaaagcccattccgtgccaagcaagttacgtgacagattgggattgaatcccagtgtgatgtagtgaagagatgttaaagttttgccaccagtgctagtgaagcttatgccgtgaggtctgattctcatctctcccatctaaatgaccacggggaccccagtcaataatgtctcccattaacatggactgttgtctagctaaggggccaagacagtgggcccaaggagaggggtgagaattatcaaagggagcccattctgtataatcaatacaatttgggcgatggggccgggagtgattagtaaccacaccagtaatattaatagagctaaggcctaataggtacataatatttccatggtaactcagccatgcttgggattgaattgcaaggcaactgcagttgagtgaggtatcctgggtgacgcataaaggaagttcctccaatggagtggtataattgataccattgttctgagagtctaattgctctgtgtcaggggagattaggggtcctggtgcctatgctccttgatcatgatatatctcaggaggagtgtcgttccagagtatggtcacactaccagtgggttaggaacatatgcccaatatgtttttgcctctgcacagggaaaacatacctcacaggatattacagctagcatggccataaacatggagtctggggtttttgcctgaccctggcgctccagcagtttttcaacttcctgtgtggttttcttgatctgtccccatgttatgggggttgatgtcattgtgactccggttggcccccattctgtcttcgcattcagattccactggctcatggctcatactgggggaaccggacgcatggttgggatccacagatccctccagtcccccattccatggtcgcacacacctagagggcacccgcacggtttgtccatctcctgtaagaacacaagcataggctgggtgtggtggctcatgcttgtaatcccagcactttgggaggccgaggcaggcagatcacgaggtcaggagatcgagaccacagtgaaaccccatctctactgaaaatacaaaaaattagcctggcgttgtggcgggtgcctgtagtcccagctactcggagaggctgaggcaggagaatggcatgaacccaggaggcggagcttgcagtgagctgagatcatgccactgcactccagcctgggtgacagagcgagactctgtctcaaaaaaaaaaaaaaaaccaacaacaacaacaaaaaacacaagcatatcctcgtccccatgtcagtaaatccactgggcctttccattgtccttcttctggggatttccataatagctttggataaactttcctctttccttctaacatttgcccrtgtcattccgccagagtcttactatctgtaccaggagtcaaaaaatttaaagtaaataaggctaaatgtaattttgtttcaggtggttagttggtctcctattccccctttttgttttttcaacatacattgtaatgtttgatgtgcctgctctatgattccttgtcctcgagggttatgaggaattcctgttttatgagtgattgcccataactgtaaaaattttgaaaagcatgactaacataagcagatccattgtcagtttttaattgtttaggaacccccatatgggcgaataatcacaaacaatgtcgtcagacacggacagccatttcccctgtttgacatgtggcatgtaacatatgagagtaggtgtctatagtcacatgaacatagctgagtgtgccaaaggctgctatatgtgtaacatccatctgccagatttcatttggagccaagcctcatgggttgcatccttccatgggtgcaacaccagggacatgctggcaagtagggcaggcttgcacaatagctggagcctggctgcgaggcagatgaaacatacgagtaagggcagaggtgttttgatgcaataatgcatgagaaacttgggcttgttgaaatacagaactgatcagtttatctgctccatcattacctagagatagtggtctagggagttgtgtgtgagagtggatatgagaaatatcaaaaggaacagcacgagagaaaatagcttgttgaagtcttagaaataagttaaacagctctggttctaggctgcttttaatagtggcagtttcaatgcgactggctacattcacaacataggctgaatcacagacaatgttaataggagatgaagcggtgagctgtaaaacctgaataactgccattagttctgagcattgagctgaaactccagaggtctttattgtttgagtatgcttaggtccataaatagctgctcggcctttggaagagccatcagtgaaataagtctgtccgcctggagtaggcttgtgatgagtaatcacaggaaggataaaagggtgagctttatcaaattgcaaaattttgtctgatagataacggttaactattatttctacaaaatctgtgagagcaatttgccatgcagtcaacatttcccatgctgctgcctgttgttgggaatccaagggaacaataatttttttctggataatatcccataagtatttttgatctctgcctacctattgttataagttgagtaattaaagacaaacttgcaaagatttcactgtctgattggatttttaaaaaagccattctaatactactacagatttgtctatgaattggcctaaaggtcttgttggagaatggagggtaggaagaataaacagaagcaaagccttttgtggctgtagccaggaggcatgtcgttgctgaagcacctgctctacaagctgtaactcagcttctgcctccttaataagttgcagaggagagcttaatgaagagtctccttggagggtctggtaaagctgtttgagttaataagtagcaatacctagcattgggtgcagccagttaatatcccctaataattgttggaaatcgttcagaatttgtaatctgtccttacggagagctactttttgaggccaaacacttctttcagtaacaatagtgcctaagtactggtatggggaggttgtttgcaccttttctggagctactttgagattccatttagtcaaagcccgttttatttctctgaataactgatgtaaaatttaatctgtagaagcagccaaaagaatatcatccatataatgaatgatgtaggcagtgggaaacatattccaaggccgctttaatgtctgtcctgcaaaatgctgacataacataggactgttgagcatgccttggggtataactttccattgataatgagagacaggctctttttgattaacagaaggcacagagaaggcaaatcgaggcctatcctgctcatgtaatagtataataacaacaacaacaaaaaaaacagtctttaagatctattactacaagaggccagtctcttggaatcactgccggggatggcagaccttgctgtaatgcacacattggtttaatctgtgcattaatagctgtcagatcatgaaacagtaggaaacattttcctaacttttttggaattacaaatactgatgaattccagggactgactcttcaatatgtcttgcatccagttgctcttttactagctgatggagttgagttagtttctcctgtgataggggccattgatccacccatacaggcttgtcagtcagccaccctagcggcaaagcattgggtggaggagaaatattaatgacccctgtcagaaatcctgacgacctagcccttttctatctgtttgcccagttattgatataggatcagggtttccctgttgggactttcctaagccttttccgttctgatatcccattttctttaacattttaaatcctggattgtcaatagtttcatttgtaagtctcatatcctgtgctgtaagtaaatcttggccccataggttaacagctatatttgcaacataaggttgaaaagtacacgactgtccatctggtctgagacgggtaaaatctcagcactctgttgaacactttgaacttttcctactcccactaaggatgtagaagttaattgcaggggccaggatgggggccaattgtttttagatattactgacacatcagctcccatatccataagcccatagaacttttttcctttaatttgcactgtacaggtgggtcgattagaagctatcgtttggggtaaatttcccttctggttgtactcccaaatccttgattccctcatttctccttatgtggagaagggtaatttgcaggcaataggcagtagttgtatattctcctggttcaaaaacccacagatcttgtgacattaccactacttgaatttctccttcatgatcagagtcaattcctgggactatagtaatgccctgtaagttgagacggcttctacccaaaattaatcccatatatcctgttggcaaaggactccaaatgccagtgggaattttagtggtttttgtctcctctgactaacgtaacccattctctgactgggagagctattcctgcgcttccaggtgttcctggggagagggaatcaatgttcctccggagatccacccctgaagtcgggttgtggcctggatggggaatgccctcattgtttgaggggcctgggtccaggcccccttctcatttcccaatgtgggcggtcccattctgatgaaattgtgaatggcattgattagcccaatgatttcctttattgcaatgagggcaaagtcctggcgtttttttctgttgggggtagggtactgcattataagatcccttctgcccagaggtctgatggcactcctttttgaaacgtctgatttttccacaattataacattttccccttttagagtttgacccttggccctttctagatttggccactaataaattagccgttgcttgagctaacattgtagagcgatgaagctcagttcccacattttgacaggctttgagaaaatttcctaagttttttgtacatcttacagaagccagtgcacgtttacaatcctcatttgcattctcaaaagctaaagttaaagttagcatctctgcagccgcggtatgaggaatctgacacctcactgcctctagtaatcatgcaagaaaatgtgcagagggctcctgcaacccttgcatggcacgtaaaaaagattgtattgggacccccttcctctggaattgtggccaacgtgtgtttagcggccagtgcacactgctgataagcagcttctgggagtgccatttgatgttgcaggtctgaataagggccattacccaacagcatatcctctgtaatgtccctgtgtccagcagcacgattctgtctagcctggtctgcacacagttcttgccaatttaaattccatgtcaggtatgaactagcagacaaacaagtgcrggccaaatgctttacatcaaagggtggaaggcgcatagcaccaaatacagattctagcaatcctaaagtaaatgggctctgtactccattattcagtacatgagcttttaattccttcaacaacttaaactctagtggggtgtgttcatgaataaactgctgtggattatttggatccagccttatagaaataggaaaagcacaaggttcgaagggctctccagctatggcagcagagcgtagaattctttgttttggggtctctatttctgttactgaaggagacagtacacgtgtgtccactactggagggggcggtacaggccaattttcatcctccctctcctgtttattatttcaatgggcgctgttggagggacaaaagattcttttgaaatttgagattcagaacatggctcctgctgtccggcagaataagaaggagacaatggcaggaggacagtatggaataaagtcaaaacagaaggatcaactttaagacctttttgataagcctgttttaatccttcccctacactgtcccaattttccgcatcgagatgcctgtctgtggaaaccatgggttatgcataacaacctcctgcagcagcttagtgtttgagaactaacctgagcaccagattgtttaagtaaaactttaagcaactgcacataatgttgctcctcagttgacaaattctgccccacgttaccctgattcacaaacttcccactcccagtatctctttagggcactgaccttatatcctctgccagcagatttgtcctggggtttctcactcatctggtcagtttcagtttctctgctccagcagatcttcttccttcacgtccctgattaggcaccacttgtggctgttggtttgggactgaatgaaggaggacaaacgcagaaatgaagacaaagacaaaaggatctgttttaaggaaggggtcagggggctccttgcttctagggaataagggccctgagcttctacagcccttcgtatttattaggtagaatcgacagggaggacgaggcaacggttgatcagctgcttgatttatcacaggctcacataattgctttctttatacaacaggctccagatgttcctatagataaccacaaagaacacttcacctacggcatgaccatcctcagcattccttctggcggcagatgcagttgtcagcttgcccacatcctgcatccatgagaacagtttgctgtttgctcatatagcctccagtggtatactgagttggtcacaaccctcattctttcggcctccaacacacaaacatggggacggtcaccagagtggatttcctggtattggaccaacagtgagrtggaggcaaagagctgcccacggtcaagacatgcctacggcttctccctcatgtgtgtgcctgtgggtggccagagccccacttgttcgaacacagtggccactctgggggcagcagcagggtgtctcatctctgtggatgaatgagcggatgctggagcagacccttgctttgagggggtgggcagttacagggaagggctgctccagcaagtggatttggaggggctgcccaggaagaggagggagccaaagccactggagcctgagtgcactgtcacctcatggttgaggagcccccaggccatgtctggccacaggccctgcagatagggcctttggcttctccaggggtcctgctacttgtgacatactgaccacttcctcacacaggccacattcagtttcttgacccccatttcttttttttaagacagagtcttgctctgtcgcccaggctggagtgcagtggcgtgatctcggctcactgcaagctccgcctcccaggttcacgccattctcctgcctcagcctccccagtagctgggactacaggtgcccgccacaaggccggctaattttctgtatttttagtagagacggggtttcaccgtgctagccaggatggactcgatctcctgacctcgtgatctgcccgtctcggcctcccaaagtgctgagattacaggcgtgagccaccgcgcccggccattgacccccatttatttattatttgtttgtttggttgttgtttctattttttcctttgcatttttttaagtttattttttaattctcttcttttttcttgtttcgcttttggccatcatttcttccttctgttctttcttattcttgttttgcagagacaagataattggaactaagaattataaggtggtctgggcatggcagctcaacttactggaaccctggaattggagaccatcccrgccaacctggtgaaaccccgtctctactaaaaatacaaaaatcagcctggcagccaggcgcggtggctcacgcctgtaatcccagcactttgggaggctgaggcgggtggatcacgaattcaggagatcaagaccatcctggctaacatggtgaaaccccgtctcyactaaaaatatttttaaaaatagccaggcatggtggcaggcgcctgtagtcccagctactcgggaggctgaggcaggagaatggtgtgaacccaggaggcggagcttgtagtgagtggagatcacgccactgcactccagcctagggtacagagcgagactccatctcaaaaaaaaaaaaaagaaatcagcccagcatggtggcgggtgcctataatcccagctacttgggaggctgaggcaggagaatcccttgaacccgggagatggaagttgcagtgagctgagaacatgccactgcactccagcctgggtgacagagcaagactctgtctcgaaaaaaaaaaaaaaagaccaggcgcggtggctcacgcctgtaaacctagcactttgggaggctgaggcgggtgaatcacctgaggtcaggagttcgagaccagcatggtgaaactccatgtctactaaaaatacaaaaaaattagcagggcatggtggcacacacctgtaatcccaactactcgggaggctgaggaaggagagttacttgaacccgggaggtggaggttgcagtgagctgagatggcaccactgtactccagcctgtgcaatgggagtgagacgccatctcaaaaaaaaaaaaaaaaaawaaaggccgggcgtggtggctcacgcttgtaatcctagcactttgggaggccgaggtgggcggatcacgaggtcaggagttcgagaccagcctgaccaacatggtaaaaccctgcctttactaaaaatatagaaaaattagccaggcgtggtggtaatcgcatctactcaggaggctgaggcaggagaatcgcttgaacccaggaggcggaagttgcagtgagccgagattgtgccactgcactccagcctaggcaacagagtgagactctggtctcaaaacaaacgaacaaacaaaaacgtaaatgtgggcattgccatggaaacagatttctcaaaaaactgatatctcaacagaaccccagaaacagctgtttccatcctaaatgccaagtcaccaaattatttacatacagaaagttctgggaagcttctaatgtcaagctacgccatgagaaataagggcaggcccacaaacctggctcggtgaactctggcccctctgaggccagccaggaggagcacacagatcttctaagcttagggtattcaaagccaaaattcaggctagtcacagtggctcacaccttaatcctagcactttgggaggctgaggcagtggattgcttgaggccaggggttcaagaccagcctagccaacatggcgaaatcccatgtctactaaaaatataaaaattagccaggtgtggtggcacacgtctgtaattccagctactcaggaggctgaggcagaagaattgcatgagcctgggacacaaaggttgcagggagccgagatggcgctactgcacttccatgcccactccagcttgcatgtctcagaaaaaaaaaaaaaaaggaagaaagaaggaaaaaagaataaggcctactttaagagataccaagtgaaatttagaagacaacaagagggtaaaaccacattactatgctcggaaatgcttggtgataaaggataaaaataaatacaacacatccaaatacaggatgatcgtgtgtgcaacaaacagagatatcatttgtcagattgcttatgcctgtgtagaagggaatatgataggccgggcatggtagctcatgcctgtaatcccaacactttgggaggccaaggtgggcagatcacgaggtcaggagtttgagaccagcctgactaacatggtgaaactccgtttctactaaaaatataaaaattagccaggcatggtggcgtgtgcctgtaatcccagctactcaggaggctgaggcaggagaatcacttgaacccaggaggtagaggttgcagtgagccgagatcgcaccactgcactccagcctgagcgacagagcaagactccatctcaaaaatataaaaaataaagcaatagggcgtggtggcgtgcgcctgtattcccagctactcaggaggctgagagggatcacttgagcccaaaggtttgaggctacaatgggctatgactgtgccactgcattccagcctgggcaactaagggagaccctgtctctcaaataaaacaaacaaacaaattaataaagcaattgttttcagcagggatgattagggtgaggctgtggtcaatattcaaaaatatatactttcctcaccttcattataatggcaactattagaaacatcaagccaggtaccgtggctcatgcctgtaatcccaacactttgggaggccgaggcgggcggatcacaaggtcaggagtttgagactggcctggccaacatggtgaaaccccgtctctactaaaaatacaaaaattagccgggcgtggtggccggcacctgtaatcccagctactcaggaggctgagttaggagaattgctcgaacccgggaggtggaggttgcagtgagccgagatcacaccactgcactccagcctcggtgacagagcaagactccgtcttaaaaaaaaaaaaaaagaactattaacactcagaaataagtgctgatgataatgtggagaaattgaaactcttgtgcactgttgatgggaatgcaaaaatggtgcagctattgtggaaaacaatatagtagtttctcaaaaaagtaaaagcagaaacacagaattacgatatgatctggcaattccaggtactaggcaaaagaattgaaagtagagtctcagccaggcacggtggctcatgcctgtaatcccatcatttgggaggccaagatgggcggagcacgaggtcaggagatcgagaccatcctggctaacatggtgaaaccccgtctctactaaaaatacaaaaaattagccratcgtggtggcgggcgcctatagtcccagctacttgggaggctgaggcaagagaatggcgtgaacccgggaggcggagcttgcagtgagccgagatcgcgctactgcactccagcctgagagacagagcgagactctgtctcaaaaaaaaaaaaaaaaaaaaaaattagctgggcgtggtggtgcgcacctgtagtcccagctactcgggagactgaggcaggagaatcgcttgaacctgggaggtggaggttgcagtgagccgaaatcgggccaccgcactccagcctgggcgacagagggaaactccgtctcaataaaaaaaagaaaaaagaaaacgattgtctttgctttactctttcctcggtgcttctcctccacccaaaggaacagattgtctttttactcctagaggcgtacagcggaccctcattccataattcaccccctttacaggctatgaggcacaggaaatgraataggttcattcgtagttcagagggaagaggtcaggccttggaatcagaacctcctttgaaccctggctccacctggcggcagctgttggaagtaagcaagtgaggggttcatctgtgaagctgggatcatgctacctatttcacagaaatgtcatgtgagatttaaatgcattacctgtgtcaagtatggggtctatggtaggcagttatttccaaagggttatctgagggagatagagcttggccaacaagaaggctgcttcctagtatgttctgctatctctaagcagtgagacacactacagtatacattcttggagaagccttgaaggttgatgatcatgttcttgggatgcagcggcygtggtgaccaacataataagcctcagcattcgcattgtaattgagctcattcaagcaaagctatcttcagtagggactgtcccgtctagagagcatgcacattttcattttacccgtcctcaaactgatcctttcctcattataatagtaaaaacacacccctgggtggagatttaagatgctgaatgacgaggaatgaacaagcatgtacagctactgtgcatgtgcacccagaggaccacccagaacaagcttactagtgacacctcttcccatccccttatgaataatcgtgtaagactcccataaagggactcttcctagtgtcagtctttgctgtctcatccttaccagcagcccgcccagaatcctcacgctctcaggatgtcctgtctattctgcacctaacttttttttttctttgagacagagtctcgctctgtcacccaggctggagtgcagagatgcgatctcacctcactacaacctccgcatcccgggctcaagcaatcctcccacctcagcctcccgagtatctgggactacaggtgtgtgccaccacacacagctaatttttctattcttagtagaaacgggttgcccaggctgtggcatctaacttacaaaatattttttcttttgcaataaattactatatgctacactttttttgttgtgtctcttgtctaaattcttttaaaccaagaagaacagatatcacaacagccatcaatagaagtacagtcagcttcagtgttccattccttggctattagggtatctcccatttccatcactctctcaggctgattcatttagacttctagaagatattaccctcaatctggataaaaaaactgagatcccaactcgtgctactgtgtgtgtgtgtgtgcgtgcatgtgtgtgtgtgagagagagagacagagacagacacagggtctcactccatcgctaggctgcagtgtagtggtgcaatcacagttcactgcagcctcgacttcctagggtcaagtgatcctcccacctcagcctaccaaggagctaggactacaggcatgcaccaccatgcccggctaatttttgcattttttgtagggacctggtttcatcatgttgcccaggctggtctcgaacttcagggctcaagtgatcctcctgcctcagcctcccaatccctgggattaaggcatgagccaccgtgcccggcccattctaatctttttaaatgactggcacaggaaacactgatcttcaccttggagggattccaggcatggactgaccttcacaactctcccactccaaccaaaagcaatgtacctaaagcttcaaacacttaaagtcatctttgggcccctttccaaagagcttatgtttccttgagaattcccatttacaaagcaaacttaacctctgctcctcactggcaagagagcctttctgctttaatttccaaggataataatttctccctcttagggttgtcacgaagattaagtgtgataattaaagggaccctctttaaaaagaatgtggtacaagacctgagttcagttatatgctaaacaaaatatagctttcctccctacctgtactttgcagccctctctctctgtatcattcacagggaaaggggtgagtgaagaaaagattttagttgtgttacatttatttatttatttatttatttatttatttatttatttagaggcagaatctcactctgtcgccccggctggagtgcagtggtgggatctcggctcactgcaacctccgcttcccagcttcaagtgattctcctgtctcagcttcctgagtagctgggactacaggtgcatgccaacacgcccagctactttttgtatttttagtagagatggagtttcgccatgttggtcaggctggtctcgaactcctgacatcaggtgatctgcccatctcggcctcccaaagtgctgagattacaggcgtgagccaccgtgcctggccagttgtgttacttttagaaacccattgatatacaaataaataaacaaaaaagaagaaggaaatagaaacccactgttatattcctcaagcctggaagaagcctggtgccacctggaatctaagagaatggaaatgcctagaaaaggtactgaaattgccccagacagtttctgtagtgggagatctttgcaaatgataggccctgagaagtctgacttgaggcatacaagggttctcttgtctcaacaggatcttttggaaccttccttctccttgggatccccaacttcggataccacagatctcagctttttttgtcccatcyaagagacaaggtggttggccaggcatggtagctcacacctataatcccagcactctgagaagctgaggcaggcagatcacaaggtcaggagttcgagaccagcctggccaatatggtgaaatcccgtctctgctaaaaatacaaaaattagctaggtgtggtggcaggagcctatagtctcaactacttgggaggctgacgcaggagaatcgcttgaacctgggaggcggaggttgcagtgagccgagatcgccccattgcattccagcctgggcaacagagcaagactctgtctcaaaaaaaattaaaaaaatttaaaaggtggtttggacctcttagatcctgagggagaagaaattaggcagagcaggtgtaggagacccagaggaagtccctggtggaagaggggaacaactctgacaggtcctcaactaggaagttggggatacttatcgaacttttttttccttcttaagagccagggtttcactctgttgcccaggctgaagtgcaatggcatgatcatagctctctgtaacctcaaattcctgggctccagccattctcctatcttggctccccaaagtgcaaggattacaggcccgagccaacacacccagccaaaactctaaaatttaaacctttattttagcctcaagcaagtattctggacctagagacactgaattgaaagaaaaccctcattaggaactaggcctcattatcttgccttatgtattatttttctcttgtaacaatattgtgagtataataattatattgtaatgtattactgtgttaaaagcatcagtttcttaaatgcaaacactaaaaatatatagctatttttgtattcctcttttgcttttgttgtgtatggacatggggtctcactgtgtcactaggctggggtgcaatggtgcaatcacagctcactacagcctcaaactcctgggctcaagagatcctcccgcctcagccacctgaggagctaggaccacaggcgcccgccaccatgcccagctatttttttttttttcatttttgttttgttttgttttgttttattttttgagatggagtctcgctctgtcgcctaggctggagtacagtggcgcaatttcagttcactgcaacttccacctcccaggttcaagcgattcttctgcctcagcctgtgggattagaggctcccatgaccatgcctagctaatttttgtatttttagtagaaacagggtttcaccatgttggccaggctggtctccaactcctggcctcaagtgatctgcctgcctgagcctcccaaagtgctgggattagaggcatgagccaccgtgcccagcctygtttggttttttattttttaaatgtttggtttttttatttttttattttttttgagacaaagtctcgctctgtcgcccgggctggagtgcaatggcatgatctcggctcactgcaacctccacctcccgagttcaagggattctcctgtctcagcctcccaagtagctgggattacaggcatccactgccacgctgggctaatttttttgtatttttagtagagaaaaggtttttaccatgttggccaggctggtttcaaactcctgacctcaagtgatccgcccgccttggcctcccaaactgctgggattacaggtgtgagccaccgcgcccagcaatattttatttgyttttgtttttgtttttttgagacagagtttcactcttgttgccccagctggagtgcaatggcacgatcttggctggctgcaacctccacctcctgggttcaagcgattctcctgcctcagcctcctgaatctctggtattacaggcgcctgccaccacgcccagctaatttttgttattgttagtagagacgggatttcgccatgttggccaggctggtctcgaactcctgacttcaggtgatccacctgccttcacctcccaaagtgctgggattacaggcgtgagctgctgcgcctggtgtgtttgagtttatactgggtagggagtcayggttaacgcctataatctcacccagagtctgagatgggaggctccgttgagtcctggagttcgaaaccccgtcactacaaaaaaatatatataaagaaaaaaaaattaagcgggcgcggtgtggcacctgtggtcccagcaactcgggaggctgaggtgggaggatcacttgagccagggaagtcgaggctgcagtgagccaagatcacgccgctgcattctagaatgggcgacagcctaaaaaaagtcagccttaacaataacaaaaaagacaatggctagggcccctcccaacctttcatgccctacccggagcccctgcgcggcccttacatttaaaagcccctttgggaggctgaggttggcggatcactggaagtcaggggttcaagaccagcctggccaatatggtgaaatcccgtctctacttaaaatacaaaaattagcctggcgtggtggcgggagcctgtaatcgcagttaccctggaggctgaggcaggagaattgcttgaacccgagagacggaagttgcactgagccgagatcgcgccactgcactccagcctgggtgacagggcgagacaacgtctcaaaaaaaaaaaaaaaaagccctaaaggaccactcttggatctgatcctgagaaagtcccttagaaaacatggcgacgccagcctcaccacctgtttccaaaagcagtgtgacgcccttcgctcccttagtcaagctaatcttactaaataaggwacaagcttcccctgaggcttgcccttcagcgcactggcactgcccacccgaacgggcgtcacggatcctggtcagtctctaggatcgcgctcgctgataggacgcttctggtcgaacgtccaaacaaggtgtgcggtgattgggccgcggagggcggggcgtttgaacggcgcgtgcgtgggagttccccaggccggcgtcattaggatcctggtgggcggtgggacttgggttcaaagaagaccaagcaggcagacgtgttcgggggcccgcgggttccgagactggagactggacctttggctgtccccacgtgcattctaggtcaacggtgcggtggcagaaccctggggctctcccccgcggaactcggccctggccgaggccccaaccacgctagtaggaggaggccgagcatccctcctcgaaatcgcgaaatcccggcccgacaatgtagccacggagtcgaaagccgcgtgcgaacttggcactcacaaagcctagataaccgtctattttctcctgtaaaataggagggatggacccccacagatcattgtaaaaggttcttacaaagaaaaatcctcctggactgggcacggtggctcacgcctgtaatcccagcactttgagcggatcacacttcgagaccaacctgaccaacatggagaaaccccgtctctactaaattagccgtggcgtagtggcgcatgcctgtaatcccagctactctggaggctgaggcaggagaatcgctttaacccgggaggcagaggttgtggtgagccgagatcgcgccattgcactccagcctgggcaacaagagcggaattctgtctcaaaaaaaaaaaaaagagaaaagaaaaatcctggaagtcaagtaaaaatgtgtgaaggtgttttataaaatatgaaatatctagaatacacaaatctatagaaggactcggggaaaggggagtgaatgctaataaatacagaggttctttctggggtgatgaaaatgtactagtactgattgtggccgcgctagcacaaaaatccgtttcattggccagacgctatggcccagggaaaaaaagaaggactagggggaatggggagtgaatgctaatgaatatgcagtttctttttgtggtcatgaaagtgcactaaaattttcatgctagcacaaaaattgaattgtacacttcaaataggtgtatttgtgatgtgcattctagctccataaaactcaaaatgtgtgaaaattctttgtaactttactaaaaattgggggcactctatagtttacaaaactatccccatccaggcagggcacggtggytcacacctgtaatcccagcactctgggagtctgaggcgggcggatcacctgaggtgaggagttcaagaccagcccgaccaacattgtgaaaccccgtctctactaaaaatacaaaattagccgggcgtggtgacgcatgcctgtaatcccacttactcgggaggctgaggcaggagaatcgcttgaacccgggaggcagaggttgcagtgagctgagatcgcaccattatactccagcctgggcaacaagaacaaaactccgactcaaaaaaaaaaaaattctccatctagtcctctgaggtgagcagcattttgtttgtttgtttgttttgtttgttttgagatggagtctcgctcttgttgcctaggctggagtgcaatgatgcgatctcagctcactacaacctctgcctcccaggttcaagcgattctcctgcttcagcttcccgtgtagctgggattacaggtgcgcactaccatgcttggctaatttttgtatttttagtagagacagggtttcaccatgttggccgggctagtctcgaattcctgacttcaggtgatccacccacctcagcctcccaaagtgctgggagtacaagtgtgagccaccgagccctgcttatttatttatttatttatttagagacagagtctctgtcatccaggctagagtgcagtggcactatttcagcttactacagcctccgcctcccagagctaaagcaattctcctgcctcagcctcctgagtagctgggattacaggcatgtgccaccacacccggctaatttttgtatttttagcaggtggcgtttcgccatgttggccaggctggtggtggcacaattggagggcagaagggacagtaaaagatgccctagaagctcagaagaaggaaagacctcagaaggcttcgacgcatgggtggggctgctgttgcagctggaccttcaaggatgatagaatctaaacaaatgcagtagtaatgaaagaggtaaaagatgggaaaccatggaaaatatacagaggtaataattagatgaagcccccacgtggtgacttgtgcctgaaatcacaagtgtgcccagaaacggggcctcactgtgttgtccagtctggtctcgaactcctgtttcaagcaatcttcatgcctcagcctcctaaagtgctgggattacaggagtgagccactgcatccggccacccttcattttaaaagtacatttctggccaggtgcggtggcttatgcctgtaatcccagcacgttgggagtccaaggcgggccratcacttgaggtcaggacttcaagaccagcttggccaacatgatgaaaccccatctgtactaaaaatacaaaaattagctgggtgtggttgtgtgaacctgtaattccagctgctcaggcggctgaggcacgagaatagcttgaacccaggagacagaggttgcagcaagctgagatcgcaccactgcactccagcctgggtgatagagtgagactcagtctcaaaaaaaaaaaaaaaaaaamcacatttctgcccaggcgcattggctcatgtccataatccagcrctttgggaggctaaggtgggtagatcacctgaggtcaggagttggagaccagcctagccaaaatggtgaaaccccttctctactaaatacaaaaaattagctgggcgtggtggcaggtgcctgtaatcccagctactcaggaggctgaggcaggagaatcgcttaaactgggaaggcggaagttgcagtgagctgagatcgtgccattgcactccagcctggacaacagcgaaactctaaaaaaaaaaaaaaaaaattagccgggcgtggtggcatccgcctgtaatcccagctactcaggaggctgaggcaggagaatcacttgaacccaggaggtagagcttgcagtgagccaagatcgcaccattgcactccagcctgggcaacaagagtgaaactccatcgcaaaaaaacataatagtaaggccgggcgcggtggctcaagcctgtaatcccagcactttgggaggccgaggcgggcagatcacaaggtcaggagatcaagaccatcctgactaacacggtgaaaccccgtctctattaaaaatacaaaaaattagctgggtgtggtggcgggtgcctgtagtcccagctgctcaggaggctgaggcaggagaatggcatgaacctgggaggcggagcttgcagtgagccgagatcgtgccactgcactctagcctgggcgacagagcaagactccatctcaaaaaataataataataataataataataaataaataaaatatatttccccaaggttcaagcctccaccctctttgccttggtttcaatatactgtaggccagtgattcccaactgggggtgactgctcctagagggcatttggcaatgtctggagacatttttgtttgtcacaaatgggcagaaagacagggaggagacgtaggtgctactgacatctagtgggtagaggctagggatgctgctattaatactacatcctacaatgcacaggacagctcttcacaggaattatctggtccaaaatattaattgctctgaggttgagtaacccccttctaggccaacacatctaaatggctgctaaatattttcacatgattattgggttatgagtttatttttcctagaaactttcactgactactcaattagacttccctcctgttactagcaatattagacctaatgtcccaaaacatgggtgttatctgagtccttcctttccatgcttttccctgccagtcctgagagtccattatgtactggtagattaggataaatcagttattttatttaaaaatgttcattctgaggccaggcacagtggctcacgcctgtaatcccagcactttgagaggcccaggaaggcagatcatctgaggtcaggagttcgagaccagcctggccaacatggtgaaaccccatctctactaaaaatacaaaaattagccgggcatggtggtgggcacctgtaatcccagctactggggaggctgaggcaggagaatcacttgaacctgggaggcggaggttgcagtgagttgagatggcactattgcactccagcctggatgacaagagcaaaactctgtctcaacaacaacaacaacaacaacaacaacaacaacggaccggcgcagtggctcacgctggtaatcccagcactttgggaggctgaggcgggaggatcacctgaggacaggagtttgagagcagcctggccaacatggcgaaaccccgcctctacaaaataaaatgaaataaaataatacaaaaattagccagatgtggtggcaggcgcctgtaatcccagctacctaggaggctgaggcaggagaattgctggaacccaggaggcagagggtgcagtgagccgagatcacaccactgcactctagcctgggcgacagagcaagactctgtttcaacaacaacaaaaataaataaataaaaaattgtcctagcagccggatgcggtggcttatgcctgtaatcccagcactttgggaggccgaggcgggtggatcacgaggtcaggagttgaagaccagcctgaccaatatggtgaaaccccgtctctactaaaaatacaaaaattagctgggtgtggtggcagccacctgtaatcccagtacttgggaggctgaggcagagaattgtttgaacctgggaggcagaggttgcaatgagccaagatcatgccactgcactccagcctgggcaacagagtgagattccatctcaaaaaaaaagaaaagcaaaaattatcagggtgtggtggcaggtgcctgtaatcccagctactcgggaggctgaggcaggagaattggttgaacccaggaaacagaggttgcagtgagccaagattgcaccactgcactccagcctgggcaacagagcaagactccttctcaaaaaataaaaaattgtcctagcatggtggtgtgcgcctgtagtcccggttacttgggaggtggaggtgggaggatcccttgagcctgggaggcagaggttgcaatgaggtgagattgtgcccctgcactccagcctaggcaaaagagtgacaccctgtctcaaaaaaaataaataaataaaacaagaaaacagagtcaggtgctcatgcctataataccagcactttgggaggccgaagtggtaggactgctggggtccaagagatcaagataacctgggtaacaaaacaagaccctgtctctacaaaaaattaaaacataaaaacttagctgagcgtggcagtgcgtgcctgtagtcccaactactcaggaggcttaggcgggaggatcgcttgagcccagtggctagaggctgcagtgagccatgcctgcaccgttgcactccagcctgagcaacagagcaagaccctgtctcttaaaataaaaattagggctggacgtggtggtcatgcctataatcccagcactttgggaggtgaggcaggtggatcacttgaggtcaggagttcaagaccagcctggccaacatgatgaaacctgtctctactaaaaatacaaaaattagctgagcatgctggtgtgcacctgtaatcatgaaaagtcaggattaaaaccatgcgtatatgttcgtgtttatataaaaaatgaatttagattctctactcagttattaacctgttctcatgtacatggatggccatggggcattctgcaaatgatggtggaggagggacagtttttcactaagtgagactgtctggcactgtgtaggacacaactgatccccatgggttaacccattaatgccagaggtcctccatcactcactgcgaccaaaacaccccctcctaaaaattcacaaaacaacccctaaggggtggcactgcccctgaggagagccactgctttcaggccacggaattagagcacaaggttcagcatctgaggcgggatctgcagggattgggaggtgaaaggattattcaggactcagggaagctcagcttaattggaagaaaaaggtagtggggaaaaaatggggggtacaagcatatgacaacttcaatatgacaacttcaccaaatctcctagcaaagccctacccaagcattacatactgacatatacattacttaaatttttatttttttgagatgtagtcttgctctgttgcctaggctggagtgcagtggtgcaatctcagctcactgcaacctccgcttctaggttcaagagattctcctccctcagcctcctgagtagctgggactacaggcatgcaccactatgcccagctaatttttgtatttttagtagagatggtgtttcaccatattggccaggctggtcttgaactcctgacctcgtgatccacctgcctcggcctcccaaagtgctgggattacaggcatgaaccactgcgcccagccaaaatatatatatatatakagagagagagagagagagagagagagacaggttctggctctgttgcccaggctggattgcagtcgtggcatctcagctcactgcaacctctgcctcctgggcttaagccatcctcccacctcagcctccggagttgctgggactacaggctcacaccaccattcctggctaatttttttttttttttagagacagggttatgccatattgcccaggctggtctcaaactcctgaactcaagcagtctgcctgcctcagcctcccaaaatgctgggattacaggcgtgagccactgctcccagcgtatttaaaaawttttttaaagaataatgtaatacagaaaagtgcacaaaccctaagtgtaggctcaatgcattgtcacaaagtaaacacacccatatcaagaaaccagtacccatatcaagaaaccaaaacattggctgggtgtggtggctcatgactacagtcccagccctttgggagctgaggctggggaggaatgggtgaggccaggagttcaagaggagcctggacaacagagtgagaccccctctctacaaaaacaaaacaaaacaaaaaatatatacatatatatttagctgggcatgggggttcacacctgtagtcccagctacttaggaggctgaggtgggaggattgcttgagctcaggagttcaaggttgcagtgagccatgatcgcaacactgcactcaagcctgggcaactgagcaagaccctccctccttttttttttctttactctacttctctccagcagagaccctgtctctacaaagcaaaacaaaacatctgtagcatcctaaaggctyatgtccctcctagttactaccctaccacaagagtaaccactagttcaatttatttttctttattttctgttagagatgggagtcttgaactcctggcttcaaacaatcctcccatcacagcctcccaagtagctggggttacagttgtgagccaccatgcccaccgtgtagttgtaacatttattttttattttatttttatttatttatttttttattttttgagatggcgttccggtcttattgctcaggctggagtgcaatggtgcgatctcggctcactgcagcttccgccttccgggttcaagtgattctcctgcctcagcctcccgagtagctgggattacaagcatgtgccacaacatccagctaattttgtacttttagtagagacggggtttctccatgttggtcaggctggtctcaaactcccaacctcaggtgatccacccatctcggcctcccaaagtgctgggattacaggcgtgagccaccgcgcccagcctgtaatatttatttatttatttatttatttatttatttatttatttatttatttttgagacagagtctaggctggactgcagcagcacgatcttggcccactgcaacctctgcctacacggttcaacccagtctcacacaatatcactcctgattagctgggcatggtggcacgtgcctatagtcccagctactccggaggctgaggcaggggaattgcttgaatccaggaggcggaggttgcagtgacccgagattgtgccactgcactccagcctggtgacagagcgagactctgtctcaaaaaagaaaaaacaaaacaaacaaacaaaaaaaactttttttttttttaagacgtgtggccaggcccagtggctcacacctgtaatcccagagctttgggaggctgaggcaggaggatcacttgagcccaggagttcaagactagcctgggcaacatagcgagaccacccttatctctataaaaatttttcttttttttctttttttttttaaggcagagtcttgctctttcgggcaggctggagtgcagtggcatgatctcagctcactgcaacctccacctcccgggttcaagcattctcctgcctcagcctcccaagtagctaggattacaggctcgagccaccacactgggctaattttttgtatttttgttagagacggggttttgccatgttggccaggctggtcttgaactcctgacctcaaatgatctgcccacctcagcctcccaaagtgttggcattacaggcataagccaccgcacccagcccaaaaattgtttcttaattacccgggtgtggtggcatgtgcctgtagtgttagctacttgggaggctgaggtggcaggatcacttgagcctgggaggtcaaggctacagtgagctatgatcacgccaatgcacccagcctgggtgaccaagccagactctgtctcaagaaaaaaaaggcatgtgttagctctgatgggctgacaaccaaattatctacattctcctcaatttctgcccctggatctctgcacttgcagtgatgactgatgcacagtcttccttcccaactccctttccttaaagtcacattgttcatcaccttctctgggaagcattctcctgtagctctgcaatgtgcccttttgggaacctgtacataagttgagttgagcatttatctcatcgtgttggtctatttcattgtctctgaagacaaggackctcactgtcttgtccaccatagtgtttttgtgtctggctcattgctggagttcaacaaatgtactgaacaaataaatagacacctcagcccatatttagagccctcctgcccccacaaaaaccytgactgtcccatgtttaggccttcctctttctctagagcaaaggtcacagtggtgtgaatctgttttctgtctcttagacctcaatgcctcagcattgccactctagccatgagtattgatctccagacacctctatctggaaatttttttttttttttttagagacagggtctcactctgttgcccaggctggagttcagtggctccataaacagctcattgcagccttgacctaccgggctcaagtgatcctcctgcctcagcctctggagtagctgggactccagttgcaggccaccatccccggctggactcgctttctgaatgttgcctagatctggcctccacatgaaagtataggatgccaggaatcacctttagacaagctggcagctgcccagcccagcttcctccacttcatctgagccatctgtcctcagaggcaccatcagtgctcattttcttttttttttttttttcaggtgtgacagcagcattcaaaacgactttaaggattatgtctgcaatgcagactttacacctctcctgcaaatggcccatcctctaaaatatctgcacagtaattgcaagtggggactttcaaaattcagatattccattttatttaatgctgaaacactagtacctacatttgttggtgatgattaagtctgggtcaaatcaagacagagaaaccacatggtaatttgaacaaggaaaggtttaatattttaaaaaaatcaacaatagccaagtgcagtggctcatgcctgtaatccaagcactctgggaggccgaggcgggcagatcacgagttcaggagatcgagaccatcctggctaacacggtgaaaacacatctctactaaaaatacaaaaaattagctgggcatggtggtggcaggcacctgtagtcccagctactcgggagcctgaggcaggagaatctcttgaacccaggcggcagaggttgcagtgagctgagatcatgctactgcactccagcctgggtgacagagtgagactccatctcaaaaaaaawaataataatataacaataacagaggattagagaaatgattagattgtgtattatttttctaaaactgacataacaaattaccacagattcattcaagagggctcagcttcaccccacctcccagactggaatgcaagtcatagctcactgcagcctcaaacttctgagctcaagtgattctcccacctctgcctcccaaagtgctgggactacaggcatgcaccaccatgccccgctaatttattttactttttttggagagatggggtctcgctttgttgcccaggctggtctcaaactctttgcttcaagcaatcctcccacctcagcctcccaaagtgctgggatgacaggtgtgagccaccccgcctcgcaagaatccttccttgccttttccaagcttttggtggctgccgacaatctttggcattccttggcttgcagatgccacactccaattcctgcctccattgctacatggcattctccctctgtacgtctgtgcctgtcttcacataacattctcctttctatgtgtctgtgtccaaatttccctcttcttgcaaggacaccagtcattatattaccgcccatcctaatccagtatgatcttgattacatctgcagactctatttcctaataaggtcatggctgggcgtggtggatcattcctgtaatcccagcactttgggaggccaaggcgggagcattgcttgagctcaggagttcaagaccagcctcggccacatagtgagaccttgtctatactaaaaaaaaaaattaaaaattactttgggaggccaaggcaggtggatcacgaggtcaagagattgagaccatcctggccaacatgatgaaaccctgtctgtactaaaaatacaaaaattagctgggcacggtggcacatacctgtagtcccagctacttgggaggctgaggcaggagaatcacttgaaccctgcaggtggaggttgcagtgaggcgagatcgcgccattgcactccagcctggtgacagagcgagattccatctcaaaaaaataaataaataaaaataaaaattagcagggtgtggaggtatgtgactgtggtcccagctactcgggaggctgaggcaggaggactgcttgaacccagggggtcagggctgcagtgagccaagatccagccactgcactgcagcctgggtaacagagcaagatcctgtgtcaaacaacaacagcaacaacaacaacaacaacaacaacaacaaaataaggtcagattcagaggaagtgaaaggttcaagatttgaaaatatctttggtggggtgggggggaggtggggagacaaaattctgcccactacagataataagaagtaaacagaattctaaaaaaaaaaatgcaagaagagcagatattaggttggtgcaaaagtaattgcggttttgccattacttttaatgacaaaaaccacagttatttttgcaccaacctaatacaaggagcagccacagctcctctcaggcggagacagagcatacaagaaaaaggctccttctggccaggcgcggtggctcatgcctgtaaccccagcactttgggaggccatagcgggtggatcatttgaggtcaggagtttgagaccagcctggtcaacatggtgaaaccccatctctactaaaaatacaaaaattagacaggcatggtggcatgtgcccgtaatcccagctacttgggaggctaaggcagaatcgcttgagcctgggaggcggaggttgtggtgagccaccacactccagtctgggtgacagagtgagaccctgtcgaaagaaagaaagagagagagagagaaggaaggaaggaaggaaggaaggaaggaaggaaggaaggaaggaaggaagaaagaaagaaggaaggaaggaaggaaaggaaggaaggaaggaargaaagaaagaaagagaaagaaagaaagaaagaaagaaagaaagaaagaaagaaagaaagaaagaaagaaagaaagaaagaaagaaagaaagamagamagacagacctccttccttcctgagatccacaagtttttggagagggcacagaagtacagaagtcgctgaagtacagtagttgctggagtgtcagtctggtggaacttgctggaaatccaccctcttgggtgccagggaaagctgttcatgggcaggtgtctccacagaggaactccactgcaaaaccatccagagggcacctgggggagctgctgaccctggggttctgctggccaccctgccctgcagaagcagggagctgggaacccacttgtgctgcaggagcctcccaggagggtttgctgaactgggaagcaaaactctttcttcctgcaatgtctctccagccatctattgacaaaacttagcatgatgctggctggtaaaaaaaatttaaatatatatatatatttaaagggtccaggccaggcgcggtggctcacgcctgtaatcccaacacttggggaggccgaggtgggcggatcacgaggtcaggagatcgagaccatcctggctaacacagtgaaaccccatctctactaaaaatacaaaaaattagccgggcgtggtggcggacacctatagtcccagctacttgggaggctgaggtgggaggatcacttgagcccaggaggtcaaggctacagtgagccatgatcacaccactgcactccagcctgggtgacagaccaagaccttgtctaagaaaagaaaaaagaaagatgggccgcccagagtctaaacggaccctgagtttctgaataatgacacactgaagtgcacccacggccacaccagcagccccactggaggctgtgtggggccctcttgctaatgcatcagcatacactgtggtacaccccacagtgtgtccaccacctgtgtaggcagtgggcaaagtaaagttgttgaaatgggaagtcacaaaaagagcagaggtgagaccgcaagatcatgagggctcacatttgctggcctgggctaagggccaagactgccacagtctaccttagacttccatttgatgaactctagcaccccaagttagggtcacactggtgggctcttcctaccaaatactcaggtccaggacttttctttggactacatcttttacccttggtgtcattgacttcaagagacctagagaatcaaaactcagattagggccaggtgtggtggctcatgcctataatcccagcaatttgggaggccgaggcgggcagatcacttgaggccaggagttcgagaccagcttggccaacatggcgaaaccccgtctctactaaaaatacaaaaaactagccggccgtggtggtgagcacctgtcgtcccagatacttgggaggctgaggcacgagaatcgcttgaacccaggaggcggaggttgtagtgagctgagatggcgccactgcactccagcctgggcgacagagcgtctcaaaaacaaaaaacaaacaaacaaaaaatacctaaaaactcaggttaggcctgctctgcttttgaaagtttttcctgccctggggcctgaaaagcacctgtggggtttaggtcttaatttggcaaggttgaaagaatctccaagcactcacagctggatgaaacatcactgtacctcctcaggcacccatactgccagccctgatccagagggagagaaacacctctacgtggaagaaccacggcggcctgctcccaccagaagtctgaatgggtttccagaggacccagcggacctcctgttacagagatgctgtagtcctgcaagaacgtctccctgcatgagtccttagggacggagctggggagcctccatttcccacataagcccttctcgattatgctttccatatcatcccttgtttgtttgtctgttttgagacagggtctctgtcgcccaggctagagtgcagtggcgcgatcatagcccactgcagctgcgacctcccaggctcaagagagcctcccacctcagcctcctgagtagctgggactacaggcgtgcgccaccatgctcggctcatttttttgtatttttttttttagagatggggtcttgccatgttggccrggctggtcttgaactcctggcctcaagtgatccgctatcttctgcctcccaaagtgctgggataacaggtgtgagccaccacacccggccctgttttatcactttcatcactcaatcccctgagaattatgacacctaaaccaggaagcacctctgcaccttatctcggacccaggattctaggcttcagggtctctcgttctgttaagaaaacaaaataaggactcgtgctgggcgctcacgcctgtaatcccagcactttgggacgctgaggcgggaggactacttgagcccaggtgttcaagatcagcctgggcaacatagcgagatcctgcctcaaattaaaaaaaaaaaattaaaaaagaaaagaagtactggtttggaccagggaatctggggaaggagaactagtgcagacatgggctttggttaagcggtcagggcaccttcatagcgctgcaagaagccactacatgcccacttcctccccaccaacagcccagcttccagtaaagggtccatgacgcagctcctccaagcagcagcgtcccaccctgatcccttactcctcaggactatttacacctcccccatcctgcgggccccacttgagacagtggttcctgagagccgggccccactagcaagccaaggtatattcttggcctcctgcaaagatgcccctgtcctatagacctctgcgcggaccgtgggcacccccacttctccaggaagaagtaggtgggcaacactcaggggaagtcaagcttagcgcccccagtctcctccccacttcggctcggtcccatctctccaggacaaggcgccagcaacggagccacaggccgcaccagcccgtctttgatcccgggtgttcggactcagggcctccaccaccccctcctaaactcrgaccctgrgccgtgggaacccagtttaggaacccaggaagatrccggaaccttcctcaaacgaggccactctaggaaattgggaatttcacatatcgttagcactcagtcgacgtttattggcctaagaacgaaagaaccggaagatgcccttaaaaagcgtggcggcactctagcttcaatcggttgcctcaacatatcaagaaacctggcattgtatatggccctcaaaagatgacgccacccggtccaccacggttcaacgaggactaagacatctgccctcaaccatcatggcggcgccactcagtttggcttcctgcccctagggatgatggccgccaggtggcttcacttagtttctcaccaccccggaagacggggaccggcgattgggcggtgtccagaggctccgagaagaaggccatcggcggttgggcagcgttgggtaagcttggtttttaaaggagccggaggtgggagctgcggaagacccgggatccacgggaggcggcggtgagcagcccttgggggagggcaaggagtggctggagagagggcgggagtgggggcggggaaggaaacttctgaaccatctggtcccgggccgggggagaccgctgggcggggacgcgaggagggaaggggcgtctgtgggcgggacctcccgggattggagtgaagagggtatctgcttgacagtggatccctggggatctacgctgagttcggagatgctccagctcgggccgcccctgtctgagcggagctttgcggcgctgaagcttacaggggaaggaaaagcctcgcccggcgtctgattggcggaaccgcgctgtaggattctttcctcagggatccagtctaggggatctggtgggatggagggtcgtcgatgtatggagtattgctttggagtcctcggccactcgctgggagaggaggaggatcgcagagggatccagcggaaatagcctcccaggaccgggatccccgtggatcccgggggatctcggggcataatctgcagggacaaaggcctcgggaggctcgggccgcgggagaactggggccgctgcattctgggttctggcggcaggtgccaggcagggcgcgagtgatccgctgatcgaggcggtggcagcgggaggacacccgctccgggcgaccggccgggggcgccctttcgcgccccagggctgcggccgctgggctacggggagccgcgggcggaccatgaagggcggagccccagggaaggggccggccctcaccccccgctcccccgctccccccttaccccaggccgcagcctgggattccccagggacccccccggagccgccgcgtctcccatggacttgcccggggactccaggtgagagcgtacccgggcggcccgcctgtcttgaccccgggagatggggatcctggcgaccgtgccgggaaactacagagccagcgacaggttcgggcgaccgtcctctgcttctttcaccctccagcccgcctggccagccgcgtctgtgccgccagcctctgactcgagcattatggggagccaggagccckaaacggccgaggctgcagctcccgggggccccttctcccctggaaaaggcctctcggcgggtcctggccgtggtgctagaagatgtcatggctgttcacatggtgagccccctgaaccaagagactctctattcccccatgactttcctcactaccaaactcgggccagatccctactgaggataactgaagtccaaatccatcattgttgtactcagccctcaggcagcctccctcatggtagagtcctgcttggctcccacttactccaacctagaattgggcagtgcccattccacccaccaacgattttgggctggaaccacatccctgtaactctgagaaactcttctgcttctttttttctatcttttttttttttttagagacagggtcttgctatgttgcacaagctggtctcaaactggcatcaagcgatcttcccatctctgcctcccaaagtattgggattacaggcgtgagccacggcgctgggccgaaactcttctgctttcttcccagcccagcctccttaggaagcaggctgaggtctttgactccactgcacagataagaaaaactggcccaaaaaaggcagtgacccaccctagctcaccctgtctttttcatttctctaaacagcgtggatgagattacccaggtcctacacctgcagtttaggactcttaatatctggcccctaattcagtccaattcatctcttctcttgggatccgagtgaattctagccccaatctctgttatgtttgtggctcagggcactgtgaggcacagggaaaccttgtcccgtccagcctcattctatcaccttgctcttgacacctctttctcttccaggtccccgtggtgccctcaaagcagacctccataccacagcaccacagctaccatcaggatcctgtccacaggcagccgcctgcctcgccaccccggcaggccgggtggtcctcgcaggccaggtgagcatggcaggatgggggtaagccgagggcccagctgagccattttaatcttcctgttccctcgctaggcctcccgaccctctgtgtttgtgtcgcgagcccttgagccgcatccaccggacctcttccaccctgaggcggcgatcaaggacaacccctggcccagaggagggcccttcacaaaaggtggaccgggccccccagcccaccctggtggtgatgctggaagacatcgccagtcctagaccccccgctgaggtatgggaactgagggtacggatgtcaagggttctgctgggttccagcagggatagaagggtaggaggcctgagtcttaggtgggtttttcttggggtgaggaggatggcattttaggcggcagacactgcctgagcaaagactatataaaaacgtctttggcgtgaacccaagcagctatccgggaactgaaagagtcaggatgtggggcactaagggggctttcctgcctccccacaaacatcccctatttttatccagggcttcattgatgagacccccaacttcatcatcccagcacaaaggtgagagggctggagtagggattatcaaaggatccaggcaacagccatcatccaggtagccagagctaggggcatcgggactgactgatccaatccttccttgtggcatcttaaaaagccttaaggggccgggcacgcccatgcctaatgccagcactttaggaggccaaggcaggagaatcgcttgagcccaggagtttgaggccagcctgggcaaccacatcactgtgaccatatctctacaaaacgttttgtttatttatttgtttgtttttgagatggagtttttgctctgttgcccaggctggagtgcaatggtgcgatctcagctcactgcaacctctgcttcctgggttcaagtgattctcctgcctcagcctcccgagtagctgggattacaggcatccgccacaatgcccggctagtttttgtatgtttagtagagacgaggtttcaccacgttggccaggctcttgaactcctgacctcaggtgatccacccacctcggcctcccaaagtgctgggattacaggcgagagccaccatgctcagacaagatattgttttaaattagttggatgtggtggtccatgcatgtagttctagccacttgggaggctgaggtgggaggactgcctgagcctgggagttcaaggctgcagtgagctgagattgtgcccctgcactccagcctgggccacagagcaaggctctgtctcaaaaaaaaaaaaaaagaagaagccttaagggataggggagttgctggctcaggtgggatacctggaagttcccctagcctttaccttgcccttcaccccagagctgagcccatgaggatagttcgccagccaacgcctccacctggggacctagaacccccattccagccatctgctctgcctgcagaccctctggagagcccaccaacaggtaaggacttgggtagagatcggatgagacttgggtgtctgggacatcctagttgagcttggaagtgtcaggtacagagttggggatagggcttaagccacctcccagggcagggcttggtatataaagatgggatgttgatgtcagaggcttgaagttcaattcttaaatgcagaacttagtgttttaagggtgggctaattcccctgtgcacaaagttgagcatgtggggaggggctgagacactgcagccaaggaatatccacctgtgaccctctcctttcctcagccccagatcctgctctggagctcccatccaccccaccaccgtccagccttttacgcccccgcctcagtccctggggcttggccccgctcttccgttccgtccgctccaagctggagagctttgctgacatcttcctcacgcccaacaaaaccccacagcccccacccccstcccccccaatgaagctggagttgaagatcgccatctcagaggccgagcagtctggggctgctgagggcactgcgtctgtcagcccccggcccccaatccgccagtggcgaactcaggaccacaataccccagcacttctccctaagccctctctgggccgaagctactcctgccctgatctggggccccctggcccaggtacctgcacctggccacctgctccaccccaaccaagccgaccacggcygcggcggcacactgtgggtggtggggaaatggcccgagccccgccaccccctcggccctgtctccggaaagaggtcttccctctcggaggagtgggagcctccccttctctcaccacatcttgctcgtccacggcatccacttccttctccgaaccagcagaacccaggtagtgctctcaaaaaacccccttgaagcctggctgcagcctggtcccagcctccttccctgagtatccagtgggcaggagacgggggataatgcagtgaatcctgtttgtccctgagccttgaccttcttggcaggttgggttcaaccaaagggaaggagccaagagcctcaaaggaccaggtgctttcagaacctgagaccaaggtaggcattcagatcgggtagaagagactagtgggggcctgagcccatgtcactctttcacyctctgccccatttttgcagaccatgggaaaggtttctcgattcagaatacgcagaacaccagcccgtcctcagctaaaccttacaccaatgggactgcctcgaccaatcaggtgaggggctcactgggcattgagccatcttggccaaacagatgcaggcttatgtcccctgaagtatagctttgtctcccctcagggagcacagtccagcctgaaagattcaattcrgtgtggggatggtttgtgctcaaaattgcctgtctgccttatgtagcactcctggccctgacatgtcccagaaactgaaatacagaccaggccttacctgtcccttcaggccccactggcccaagrtttctcagtggcctctgctctttgctcacaggttgaacaagaaggagttcagcttggaagaaatttacaccaacaagaattaccaatcacccacaaccaggaggtgagacacttggaaggctagagggtggcagagggaaatctggagctgtggagcaccctgataaaaccagctcctctccctgccttgttcaggacctttgagaccatctttgaggaaccccgggagcgcaatgggactctgattttcaccagctcaaggaagctccggcgggctgtggaatttcgggacagcagccttcctcgatcacgaagaccgtcccgtggggtccgggctgcagggggcaggactgttcctcccaatgtggcccccagccctgatgtgggccccctgctccagcagcggctggaggagctagatgccttgctcctggaggaagaaacagtagatcgggagcagccccactggacctaggtgccccatctgttggtcatccatcctgaagggacaggaaacctcccaggcagttatttttttttctctatatttctagtaaagttttcgatatgtttctgattcttttgtatctctagctgagtttaagattgatttggctgatgtttctacgttgacccccaaaggtctgggaactggggctggtgctagagatggtgacaggggttgggtacagagtacagggagggggtgaagtggtcacttgagatagatagatagatagatagatagatagatagatagatagatagatgatagatatagatggagttccgctcatgtcactcaggctgragtacaatggcacgatcttggctcactgcaacctctgtctccctcattcaagcgattctcctgcctcagcctcccaagtatctgggattacaggcgtgcgctaccacacccgctaatttttgtatttttagtagaaactgggcttcaccatgttggccaggatggtcttgaacatctgacctcaggaaatccgcctgctttggcctccctaagtgctgggattacaggcatgagccaccatgcccggcctagagatactctcttgcttagaggattctcctgtgtggagggacacttctgaatcagtgccagatgatactgtgaccctagaccgtggtctgggttctcccaattcatttatatcaaggagactgaaaggcctatagtgggtcaaggccttgaagatcaagatggccctgaattcctgctaacatgcaggccaggacctgctgctggattcaagagctacggctaggccaggtgcggtggcttacgcctgtaatcccagcgctttgggaggccgaggcaggtggatcacaggagcctaggagttcgagaccagcttggccaacatggtgaaaccccgtctccactaaaaatacaaatattagctgggtgtcttggtgtgtacctgtaatcccagctactcaggaggctgagccaggagaattcacttgaaccsgagaggcagaggttgtaatgagctgagatcgcaccactgcactccagcttagggaacacagccagactctgtcccccscaaaaaaacaaaacaaaacaaagagctaagagtaatgggccataatgaagcactcacgacgactgtcataggtgcttgacctgcacatgtccctgcgacagggaattagtcattttatggacgagaaagcaaggcaggcatgtcagcgcgctgtccacttttaaaacggtaacccgggcaaccgaaggccagaaatggctgtctctttttttttaagccagtcacattgagcagtggggtgcatctttcataactgagaggcatcacagggcagtggctgacatagacgtggctaggagactaccagcccgtctgtgcgcgcattcctttccgtcccagtaaaatggggctgacagcatctccttcrtggaattattaccaaacgcagtcacaaacgcggagaagcgctcatgcaggtgcaaggcgttttcgaattgctagcactcgggaccgctgccagcagccgcgcctggaagggacgcggctgcctgttagtgcggccggcgcaggcgcaggcacagcacgcggccgctcgggccaccccgggccgcggaacgactcgcaagcagccagcctgacggcggcgccgccacgcgcgtgcgcgagacgccaggctgtctgtgggccgcgccgagcggcggaaaggcggcgatgacttaactggctgtggaacggaacctcttgcagccgcgcgccccccggcggccaaccgcccccaacgcctcaggccccgcgtctccgcccctcgcctcgacgccatcaggagaccggccaataaacaaacagcaggaagaggcggggccctgtagtaaccgccccaaacacctacttctaaccagtcgagtcacaagactggggggaagggcggagccaatccgacgtaacccaatccaagatttgagggcggttacatgcacccactccctcgggtttggctccgcccctcaccttgacgtagccctcccagcctatcaacgactgcgcccgttgggggtgaggggaagggggcggagcgtgggaggaggccgagagaggaaggaggcgtaggctgaggaggaagagggaggaggggtagggaagtcctggcggagaagcgccctaagactccaaaggagacaacaggagtttgtgctggagctcccccgctgcccatcggccgttccggatcccctaaggcccaagtcggacagagacggaggaaaggaggaagagacttttatgtcggcggacaggggagctgtacccgtcaccgttgcctcacatccggggctttggagggctggcctcgctgccccgccccgcctcgcgcctttcatggcgaccggaggcggaggctggaggagctgggcycggaggaggcccctttaaatctccttaaaggggtggccactgaactcggcggactgcaacgccagccttaaaggggaagccgccgagcagacgctgacaaattgagaactgtgccgttgggagaactggggcgagtggggtttttctttacgtcctcctcccccacacacaagaagtcttttaaattcaacttaaaggggaagtggccgcttgtggaggactagaaactaactccgagcccttaaagggacggcctgctgttagaaggaccctggactccttaaaggggtggcctctttgagccggaggacttgagacacttttaaaggggaggtctgcgtttcggggcgagctttcggccccttttaaaggggtggcccttcctcttcctcggggagacttgcatcgacccctggcagggggtggccaccgcactaggccgccggacactgtcgggtcgtcttaaaggggccgggagctggacaacttggggcctcgccttaaagggacggccgccccgttttcgccgtcgcggccccgccgagcccgcagggggggccctcgggcttgtcgccccgggggcggcgccggctccccgggccgtggccttggggcaagctcggggccagcagatccggctttaaaggagaagccgtggccctctcgtcactgtgcagccgccagcgccgcgcctgcgaccccgggcctgcggacaggccgcttcgggccccgccgcctccggatgcggcgctgagggcggtcgccatggagacggcagcggccgcggccccgggtccgggctgggcagcagarggggagcgccgacggcggcgctgctcgcgccgagaccgagaccgggagcagcggcgccgccgaggtccaggcggcgacgcgccccgggccctgttggccgccccgcgcggctcctcgtcctcgtcgtcgccgccgccgcccgccaggccttggtcgtcagcttcgtctggagagcggcctgggggcccgagacgccggcggccccgtccgagacctcgacccccgcgaccccgagctcggaagcggcctgccggctcgggcagccgcggggaggaagaggaggaggaggaggaggaggggggcgcagacgacggcgaagccgaggaggagcctgaggaggaggaagaggaggaggaggacttgatcgatggcttcgccatcgccagcttcgccaccctcgaggccttgcaggtggggcctaatggggctaggagactttgggggtttccgaggggcagcaaggagggggcagtgcccctagtgggtggagttgaggggggaatgctggcaccccaaaccagagcaaccggctcctctggccaggcctctgccccgccctggggtgggaggaggtagagctcgtctctggggacccggtttcccggcccgaggggtacttcggcaacctggtcacccctagagggrttgggagcttgcccttttccatctatctcagccccacctcctcctycacagaaggatgcatctcttcagcccccagagcgactggaacatcggctgaagcattctgggaagcggaaaagggggggctccagtggggccaccggggagccaggggacagctctgatcgagagcctggccggccccctggggatcgggcccgaaaatggcccaataagcggagaagaaaagaggtgaggttgtcccttaaaactctttaggcagaatgtatttcccacagccccgtttttcatcagcaacgccactgccccttgtaaacagagaccccagtttctaagggcaaagaggcaagcagggcaaatttgagcccttactcatccgggtctgacgaaggcctgtctacagtcaggtgcacctccttttgcctggttctgtgtctacttcaaacgttttgataattcagagaggcgtcaaaggaatatagttgggtcgtaaattaattgtggttcctgcccttcctcgaggtggtggcagtccagcagaaaagaaatagccagcaagcaaacmcctagaccttaatttgagaagctacagaagacaaagatggggagagatgctacagaaacccacatgaggaagccgcttgtgctgcctgggggatgggaggagagttgtggttggggaaagccccctaggatgtcttagtcaggtcctgaagtatagtcagaagtttgctaagaaaagacacggggaaaagttgttttgggcaagagcatgaagacgtgaggacccggcgtatttagagaatggtgagarcactgggacccgggtgggcagtggcgggagaagcagctggaaggagaggctgagagtagatccyggaggcccatgagcgccctgctgggagctgcgactttcccagctgcctcagcagccgcctccctcacctctggactctggtcttcctcaggcgtcctcccgtcactctctggaagctggatacatagtaagtgctatccacctgtcctggcccctccctgctccaccctgggcctcttccctctcgtgacacctctgtctttccttctccccagtgtgacgcggaaagtgatctggacgagagggtgagtggggctagagcttgggtgggcagtgtcactgcttgtaaaagggactgcagcataaaggycttctgcgtgcagcagacagccttcccttgagtgagaaacatggcttaggttgagtcaggattaggtttttgggaggaacgggggtggattgggagggtaaatggcgtcattttttcttttggtgactaggggttagctgaccaaggaatggagggtccatgctttggcatactatcctttccaaagcccttgagctacttctggttctccacggaaacccagagtggctgtggcactgagatgggccttcttcccatcttagaatgaagatctagattcaagtctgagcagagaccgcagatagagtagtgaggacactaaatcattgtagtcagtgtagggactcagcccataaaggtgtatttgagtttatccttaggggcgatttgcttgttgtgagatagtatgtcctagaagttaatgcgctacccattgggcccatgtaagtaactcaatttgcactccctgatgtgtgtcttgtttttgtttcaaaagttggctggataggactgtggtgaaccagagggttcttgtcaatttccgtcatccatctckatctgtctaggctgattgttgctacgagaacagggggcccattcttgaggcaatctgcaagcctgagttttaatgaggaatctccggattcttaaatatctgcagttggtttaaaacttttaccaacgctggtggaccaaataaatctgtaagcgagggaggcctgtgggccagcagctagtgacctctgacgttttggtttggtttgcctgcttctctgctgcttcaacgctgcctccatttagtcctcttggcctatcggattcttggggtcagctgctccactctgctttttctccaagctcagccccctagagcccagtctttgayggatctcagctaaactgaaggaacagacttgccactaccaccagttcctagcagcctccagaggctatttggccttcctgggtggaggcctggcccacccacaacctaactctatcccttgcccttcttccccaggtctccgatgatgacctcgacccatcctttactgtctcaaccagcaaaggttggtcccaaggtctggggctggaggcacgggagggcagtggggtgagcatgagcctcaactgagcatgtctgccatcctgccccacagcctcgggccmccacggcgccttcaatgggaactgtgaagcaaaactctccgtggtccctaaagtgtcgggcctggagcggagccaagaacagcccccggggcccgacccgctgctagtgcctttccccccaaaggaaccaccgcctccaccggtccctcggcctcctgtctcaccccctgcacccctgccggccactcccagtctgccacccccaccccagccccagctgcagcttcgggtctcacccttcggcctccgcacttctccatatggcagcagcctggacctcagcactggcaggtgagtggtcttgggggattgatgcggtccggaagggcctggtcagtttggtggyggggacacaggatggtacctgtggggtatgacttgaaaaaggattctgagactgaaaagtttgagaaaaacaaatggaaagagatgactgcaggacttatttgagtccgttacacattcccatgcaggggaatccaggctgtgctgbttcccagttgtgtttgctggtgagaacgttttttcaggcaggcaagtctgctcggaatagtgttctttggaacatactttgggaaatgctgacatgatggttaagagcgctggctttggtgtcagacccagattcaaattcttgctctgacgcttcctggctgtgtgatttttgacaagtcacttaacccctctgagcctcgatttcctctttctgtcaaatggaatgatcatagtactttcatcttaaagctgttgtgaggattaactacgagtgaatgcagtgtttcccaaagtgtgtacattcagcgtcagtgatatatgggatgatttcaggtcttacgtgagtaaactttaaaaaatagtcctgagttagcttttgtgaactttagaaagctgagtgtcatgcctcagccccttgatttcacacgcgattgcttagggggaggctaagttaaaaaaaaaaaaaaggaaattgagttcttaaaagaagccattgatgcagttcagatggttactttgctgggcagcagtggggaaggtggcgtggaatgttggagacttggattagcttttaaagcaggtgccagcacttggcctacagcaggtgcttgccacagggtaagaactattgacacttactattgatgctctattttgtcacygtcattgtcattgttattattgagaaaactaaggctcagagaggggcagtgacttgctcaaggtcaccccgggcattcatggcaagatgggcctagaattcaggtctyctgactcccaggccaggccagtgtggtgctgcttccactgttgtagggtgggaccccaggtggcttgttctaattaagcgtcaacatgaatgatctgttctgtgctgtggttgagtcagaaagggaaagtcatctggccagaratggcagaggcagctgcrtggatgcagagacctagacagggagaaataggggttgctgggtgtgggaggcgcctcagtctgagaacggattccctcggtggggggcggtcctggggctgggttctgccacctcccgtgttggagaaccagggtcacggtatcacccaggcttctgaccccctcccgtcagagctggcacctcccaacccctcactcatctccccacttctctccccagctcttcacggccgccccccaaggccccggcccctcccgtggctcagcctcccccctcatcatcctcttcgtcctcctcctcctcatctgcctcctcctcgtccgcgcagctcacccaccggcccccgacgccctcactgcccctgcctttgtccaccacacagctttccccctcccgggctgcggccccccccaccaccccaccacccctccttgttctcccctggccccaccctgcccccacccccacccctgctgcaggtgccagggcaccctggggcctcagccgctaacgccctttctggtgagtttggggtcctggccggggggtggggggccatcaccccgggctcgggcccagttggctttggggcacctgagcctcagcagacagcagggcttgaggagggagtggctcgaggccagagggaaggcagtcacctgggcccaaggaggctgatgtggcgacagcattaaagccttctcccgtcccctcccacagagcaggacctgatcggccaggacctgaactctcgctacctgaatgcccagggtggccctgaggtggtgggggcagggggctcggcccggcccctggccttccagttccaccagcacaaccaccagcaccagcacacccaccagcacacccaccagcacttcaccccttatcccccgggcctgctgccaccccacggcccccacatggtgagctcctcattgggctggcgatgaggctcggaggcctctggggagggcatggcttctgggggaaggcccgggtccctggctggcagcttactcttcccttctcttccctagtttgagaaatatccaggaaagatggaaggccttttccgacataatgtgagtgtgtgtgtgcgtgtgcgtatggggtgtgtggtgtgggcgtggatgcatccatgcttgtgaccctgactgctggggtccagtcttcagcacaaaagcaagagccttgagcctgggacagctccctggggggctttagggtggaggcccgtggactgacgggcaggctggacttgggctgcgcctccacccccacctgtactagtcccccttctctccacagccgtacacggccttccctcccgcagtgcccgggctgcctccgggcctcccgccggccgtctcctttggctccctgcagggggccttccagcccaaggtgagctcccaatccagacaccaccaccgcctaccatcttgacaaacccagacacgccgggtccaagcacccttctcccattccccaaagtcgtgcccatcctcctgccctgccctgctgcacccagttttctccaaagccatgatccctccctgcccagtgtcccagcttggttctggatccctttgtgcttggtgccagctctcctgtctgatccctccactcccctttcccagagcacgaaccctgagctgccaccacgactggggccggtgccgagcgggctctcccagaaggggacacaggtgagggggccagggcaggtcctgggggagctggaaggtgtgttgcggggagaacagaactgacttgaggagagtgaactgctgattcctcccttgaattcacaatcgggtgttcctgggtgtctaatagagagggaatttctgtaaatagctggctttcccaggcatgaggaatgagagtttcatgagcttgtcccagaaataggatgattaggacaatggtttttgtagtggttttcaaactttttaataaagttacaaaacactttttttccaaatgacatcataccaggaagccctgttcggaaaacaaaagataagctgccccttggtgaagtgaggagagccagagcctccctccccttagcacttgcagcagtgtagaccccagggctgcgggaacgttgtgaaacgcacaggaccagtttcctacagggaagactaggccagaggttttccaacttccttcaaaggcattttccctaaataaatcttaaacagaccgctatactctaaagttggtaataggagagcttctctgagaaacctgtcctgcctgccccctcaccacccgcagccttccagcaggrcagctccctggggcttggttcagaaaccttgtgctggaggagagatgcctagactgggagagatggggaaaggagtttgggcctgagcaggaagggtttgagggagtcccagtgtctcaggcatgttgggggtgagtggatgctgtggagatgcgaggcgcctggcccaggactcgggtctgagtcgcctcccatctctcctttgccatccmcagatccccgaccatttccggccacctttgagggtgagttgtgtgaggacctcaggctgcatgaggctgggggctggtgttagcatgtttggctraggggggttttgcttacaaataagtgagaagcccagaacatggaggcagccagatgtggaacagcagagagtgagggctttcaagttgcagacctgggctcggatggaactggccatgggaccttgggcaaggcagttgatctctctgagcctcagtttcctaggctgtaaaatgaacctagtcatcccttggttgtaggaatgatgagtagggatattttgtggcgaggctgggcccagagccaggcctggagtggatgatgagtgaacgttctttccttccctttccctttggtcatccttctggggcggcagaaaccagggaagtggtgtgccatgcacgtgcgtgtggcttacatgatcctgagacaccaggagaaaatgaaggtactggggccggagggctggggagagtgggtctcagagtcaggggaggactgagctctgggcattggccctcaacagagctcagcagaatcttggccagaaacattctctcctgtcccccatcactgctgaacagttctatggctggcaccttagttctctggctcattagggggctgctcagagaaggctccgagagaggcagaagataggcatccaggccccatctgggtgccagccagcctttggaggggaaccacgggtgagagagcaagagggggaccagactggctcctcatgtactgcccctctccctgtgtcccacacagggtgactcccacaagcttgactttcggaatgacctcctgccctgccttccggggccctatggggccctgccccctgggcaggagctctcccacccggcctccctcttcactgcgactggtgagtctggccagccccctcgggcctgaggttccctgtctatagcctgaggcccagcttgtgcccactcagcctcatcagaatctcccacctctctgccccaggtgccgtccacgctgcagccaaccctttcacggcagctcccggggcccacggacccttcctgagccccagcacccacattggtaagagccaagggcktgttgggcaacccaggctttgtccctgacttccaggagatggaaatcagacccagcaggcagctggaatgcaggatagacctggttccacttgcttagtgaccttgggcaggttactctaccccctctgagccttgatttcctcatctgtaaaatgagtagggaagggcagggtgacttcagtctctgccagctggagccctgtctcccagtagccagtggcaggggcagtacgccacctggaaggggaaggtggggaggccatgctggcccaggggagagcatggccactgactcctaggatcttggcaggcttcttggggaggtttcacctgggtttgggtggacaaggaagagttgagcctggtggcttggagaaaggtgttcctggctggggacgtggtgacattccagtggcgggataggttagttgttctgtctggctgtgtgacgcatgcatgaagttagggtcaggtcgggaagggccctgcatgtcaggtggggggaagccaacaaggtcttcaggcttgctgcggagcggagatctgctgtgatgggtccaggcggctggtgttggggagttggggagaagagcgtgacttcatgtcaaggaagccctgggttggtaccgctccctggctagatgaccaccagcaagtcatttcacctctctgagcctctctgttttatcatcttcaagtgggcatgatcctaaccacctcttgggctttttgtgaggttaaccgacagggtgcttgtcaaagctcaacaccttcctggcccaaggaagtgctcagcacatggctgctgaaagcaggcagctgaggactccaggcaccggtcctgcctctgcccagccaggcctggtgcctgctcagcaccggctgcccagtgctctgaccacccccctttcctcccacagatccctttgggcgtcccacaagcttcgcctctttggctgccctctccaacggggcctttggaggcctgggcagccccacattcagtgagtgcgggtgcggtggggtgggggggctgcggccacagggtgagagctcagacggtctgggaggaggcctgaacagggcctcccacttctggcccctgtcactctctgcttcaccctctgcccagactccggcgccgtctttgcccagaaagaaagcccaggggccccaccagccttcgcctccccaccggacccatggggccgcctgcaccgcagtcctctgacctttcctgcctgggtccggccccctgaggccgcccggactccaggctcagacaaggagcggcctgtggagcggagggagccctccatcaccaaggaggagaaggacaggtgtgcctcccacccacccygcccctgccccaccctcagcccctgctgcccctggagaacttcattctctccccacrcctgccctccagggacctccccttctcacggccccagctccgagtttctcctgctactcccaaggcccgggctggtgaggaggggcctcggccaaccaaggaatctgtgcgggtaaaggaagagcggaaggaggaggctgcmgccgccgctgccgctgctgctgccgccgccgctgccgccgccgcagcagccactgggccccagggccttcacctgctgtttgagaggccccggccgcccccgtttctgggccctagcccaccagatcgctgtgctrgcttcctggagccaacctggttggcagcacccccacgcctggcaaggccaccccgcttctatgaggcgggtgaggagctaactggacccggggccgtggccgctgcccgcctctacggtctggaacctgctcaccccttgctctacagccgcttggctcctccaccaccacctgctgcggccccgggaacccctcaccttctcagcaagaccccaccgggagcccttttgggggcaccacctccgcttgtgcccgccccccggcccagttccccacctaggggccctggcccagctcgggctgacaggtgaggggaacggsggggggtcggggcaaagctccatctccccttcctttaaccaggtcctagggctgaggttttaagccagggctggagggcaaaggtcataacctcaccagccacctctgaggtcatggaacctgggaacagaagcctcaacccccacaagaccaagcatcacatggagtgtagggtcactrggagagcagaggtcacagcctctagagaagggagaggggcgtgtgcatgggagtgtggctcatctcgggggccatggggcctcctgaggtacacctttgcccctgtaagggcctctaggccctgggcctgcctccccaagggctcactaagccagaggccaaagtgccccctcccgttcacctaccacccaagtcctcatgccctccgagggctgggggaggaggggctcaaggaaggggggttccatgtacatatttatcacccctttcacatagccccaagaccttttgtacatttttacaggggtgcccctcccaacagttcccttcctggttaattaaaccctcagactggtgctgtgttcctagcctctggcctctctgtggggaaaggggactgcagggggaagagccgggaagggacagtcaggcttctccctgggaaggtggggccagcaggagatgaccaacagggggcaggacctggggacctgggctggagggaagggcagaagcttcctacttggctgacagccccggttcccccaacatgttcccgttcactctgcccccacccccaaaggctcagcctctaaatctcagactccaccacctcttaatggctcagtccccttcaccccatttccaagtgcccccaggactcctgggccctgcttccctgaaccctgttctccaaaaccctgccccaggctaagggtggccagagaaggtcaccatgtaccacacaccaaagaagggggtcggcccaggggtgggcgacacaggcagcttcttcggcagcstcacggcagcaaccccagccttcccaaagcagcaggcgcctccaggctggggcccaacctagaaggcaggggtcaatctaacaaaaccctaacgttgacttttttccctggtggggcttcttctgtaacatgacttgcgaatatttatataaaaacgagtgttacaatgagacccccggctcctctttgagtgtgtgtggggtgggttggaccagggtggggtgtgtgggtcctggggtaagggagggatgaggacagtactgtccgtatcccgccaaggttttcctccctgccatccactgggcaagttggtctgccatttctggagggatgggttcgagggttgggcactgaagtttttcacactgtttttctataatccaggaatacatagtatgtaggattcaagcaacccaktaagacactgagcaaaacattaaatttctccttcacctgccaaccttcccaagccccatccccttcccccaggtaaccgctgtaaatcattaggtgtatattcttcaggtcctttctatgtgttctcgcacatgtctgcacaggcagagtatgtttaaaaagatctgtaatttaaaatttttctggtttttgtggagtaatacatagtcattataaaaccattcaaacacacaaatacagaacacggagggaaagtgctccatcatcccacctcttgaggataaccagttttttgctttgttttgttttgttttgtttttttgagacggagtttcgctcttgttgcccaagctggagtgcaatggcacgatctcggctcaccgcaacctctgtctcccgggttcaagcgattctcctgcctcagcctcccgagtagctgggattacaggcatgcgccaccacgcctggctaattttgttttttgttttttttttttttttaatagagatggggtttctctatgttggtcgggctggtctctaactcccaacctcaggtgatctgcctgccttggcctcacaaagtgctgggattacaggcgtgagccaccgcacctggcaaccactgttaattttcggggaaattcctccagttatttttctagctactacaggtcactgcaacaaagcgaggcacatgaattttttcatttcctggtgcatataaatgttatggttctggctgggcatggtggctcacgcctgtaatcccagcactttgggaggttgaggcagatggatcacgaggtcaggagattgtagaccatcctggccaacatggtgaaaccctgtctccactaaaaatacaaaaattagccaagcatgatagcgtgcgcctgtagtcccagctactcaggaggctgaagcaggagaattgcttgaacccaggaggttgaggttgcggtgagctgaggtaacgccactgcactccagcctgggcgacagagcgagactccatttccaaaaaaaaaaaaaattactgttccacaatactgcagtcttaagtgagcaatagtgttatgtctatgaaaacggtacatcccttaattttttaaatgctaacagtcatctgagcttttgcaagtcgtaatctttttgctggtggaagttcttgcctcattggtgatggctgctgactgactgaggtggtggtcggtgaaggctgggatgacggcggtttcttgacaacaaggaactttgcctccttgattgcctcttcctttcacttgaacacttagaggccattgtagggtgttattaattggcctagtttgaatattgtctctgggaagagggaggcccaagcacagagagagaacagttaacacacatttattgattgagttcgccctcttacatgggcactgtttgtggcaccccaaagcaattacaatagtaacatcaaagatcacagatcactataatagatacaataatggaaaagtttgagataatgggagaattaaccaaatgtgactcaaacacgaaggccaggcgtggtggttcacgcctgtgatcccagaactttgggaagccaagatgggtacatccctgaggtcaggagttcaagatcagcctggtcaacatggtgaaaccctgtctctactacagaatacaaaaagctgggcatggtggctgactcctgtagtcccagctactcaggaggctgaggcgggagaatcacttgaatccgggaggcggaggttgcagtgagctgagattttccagcctgggtgacggggcgagactctgtctaaaaaaaaaaaaaaaaagcaagtcactactaaactgggctgtcagggctgttgcctacctgagctcctatagaattgactgagtgaccttattctaagtatgcctgctttttttcttttttgagacagggtctcactctatcacccaggttagagtgtagtagtatgatttcagctcactgcaacctccacctcctgggctcaagcagtcctcccgcctcagcctcccgagtagctgggactataggcatgcaccaccacacccagctagtttttgtattttttgtagaaacagaatttttccatgttgcccaggctggtctcaaactcctggactcaagctatctacccccttggcctcccaaagtccagggattacaggtgtgagccaccacacccagacttgttttgcttttgaggcagcttttgagcaaaacaacagccggtctgttgcccaggctggagtacagtggtgcaatcacagatcacttcagcctcgaactcctattcccaagtgatcctcctgcctcagcctctcgagtagctggaactacaagcctgtgccaccacatttggctagctttaaatttttgtagagacagggttcttgtcttgttgtccaagctggtctcaaactcctggtcccaagcaatcctcctgcctcaacttctgaaagcgctggaattacaggcgtgagccactgtgcctggcccataaatgtacctgttgccttaggaaagatgcagccaacattccctgccaccaccacacatatccaggatgtctagggaaggctcaagcctagattgctccaacagaagtcagaaacaagtgaccagaaggtgaacgttggcttgcagacaagatttcacatggaagttcttgttttcagcttctctkgaaaaatccaaaaatctgtggtcactagacctgcttacccccatggctttcctttgaaatggggcataatctcaccagattgcgactgtcccctccacttgttgtcttggagtagaccacagtcactattcaggctacctctctggcccctataggcatttgagagtgactctcagtgaaatattttctttctttctctctctcttttttttttttttagacagagtcttgctctgttgtccaggctggagtgcagtggcacaatctcaggtcactgcaacctgcgcctcccagattcaagcgattctcctgtctcagcctcgcaagtagctgggattacaggcatgcaacaccatgcctggctaattttttgtatttttagtagagacaggagtcacactaaatgttggccagcctcgtctcgaactcctgacctcaggtgatccgcccgcctcagcctcccaaaatgccgggattacaggcgtgagccaccgtgcccagtagagttaaatattttctagacatgcctatcccacctctcctagatctctccccaagcacctcagatatcccaaattaagtcatcttcgagatctgatgccccacttcccccaaggtttccatctctgtgtcatcagcactcaagtcagaaacctccctcttccctcacttgatgcagtttctgagctgcctttgattctttcaaccactgttgacttcatccacagtgccaggcactgcacttagtggctggggatacagaggtacacaaaacaaaccccagccatcctggagcttacattggactatgaaagaggacaattacagaagctaatgacagaattccaagggccaggcgtgccgtctctgcctgtaatctttgggaggctgaagtaggcagatcacctgaggtcaggagttcgagaccagcctggccaacatggtgaaaccctgtctctattataaaaatacaaaaattgccaggcgcggtggctcacgcctgtaatcccagcactttgggaggccgaggcaggaggatcacaaggtcaggagatcaagaccatcctggctaacatggtgaaaccccgtctctactaaaaatacaaaaaattagccgggcatggtggcgggtgcctgtagtcccagctactcgggaggctgaggcaggagaatggcgtgaacccgggaggtggagcttgcagtgagccgagatggcgccactgcactctagcctgggcgagagtgagagactccatctcaaaaaaaaaaaaaaaaaattagccaggtgtggtggcacacacctgtaatcccagctactcaggaggctgaggcaggacaatcacttgaacctgggaggtggaggttgcagtgagccaggatcgctccattgcactccagcctgagcgacagagccagactccatctcaaaaaagaaaaaaattcatttttaatttttctgggtacatagtaagcgtatatatttatgtgttacaagatattttgatacaatcatgcaatgtataataatcacaaaaatatggaaagcttcacgaatttgcaagtcatccttgctaaggggccatgctgacctctgtataatgttttagtatatgtggctgggtgtggtggcccacgcctgtaatcctagcactttgggaggccgaggtgggcggattgcctgaggcaggagcttgagaccagcctgggcaacacggtaaaaccccgaagtcccttcctcactcaggccgaggcaggcccttgagcccaggagttcgagaccagcctgagcaacatggtaaaaccccgtctctatgaaaaatacaaaaattaggatgtgtcggccgcacgcctgtagtcccagctacttgggagactgaggcaagaggatcacttgagcccaggaggttgaggctacagtgagcaatgatggcaccactgcactccagcctgggagacagagcaagaccttgtcaagaaagaaagaaagagagagagagaagagagagagagagagagagaggaagaggaaagttatacatatacatgtttgttatttaaaagtagagatgggagctgagcacaatggctcttgcctctaatcccagcacgtcagtaactgaggcaggaggatcactggagctcaggagttcaagacccgtctttatgtaaaaacaaaaccaaacacatggccaggtgcagtggctcacgcctgtaatcccagcactttgggaggccgaggcaggcggatcacctgagatcaggaatttaagacgagtctggtcaacatgacgaaaccccgactctacaaaaatataaaaattagctgggcacagtggtgcacgactgtaatcccagctacttgggaggctgatgcatgagttgcttgaaaacgggaggtggaggttgcagtgagccaagatcgcaccactgcactctagcctgggcgacagagtgagacttcgtctcaaaaacaaaaacaaaaacaacacagatctctgtggatagacatttaagttgtttctagcatttgtgttatgacaaacaggatttctggaagtatttttattattttattattattgctgacataaaattcacataccatgaaatgtaccttttaaagtgtgccattgcagtggttttcgtatattcacaaagtcgtacaaccattgccattatctaattctggagccattcagaaacacccatttttttatggccatgtgtgcatgtgtcagaagaaggcactcttggaggtgcagctgatgggttgtacaaccactgccattatctaatcatggagacattcagaaacacccattttgtatggytgtgtgtgcctgtgtgagcagaaggcacctgtggagatgcagctgatgggctttggggtgatgagtccttccaacggaaagaaagcagggcccagaggcttgggatcaccacattacccctgctacactgagcaatttgcaatgactgccagtccctcaggaaaagttagttctatctggatttttgcacatcggatttccttcaagcaggctagacccttaaatattccagttagaacagtctaatgataggaaatgccccagtaacatgggagttgtaatatctcaattcacagaccttgcagttgtgtggtccttttaaaacctaagtcaggtgatgtcattcctcacctgacttttgagagttttcaaaactctcaaaaaacggaaaaaagcggtggcttacgcctataatcccaacactttgggaggctgaggagggcagatcacaaggtcaggagtttgagaccagcctggccaatatggtgaaaycctgtctctactaaaaaaaaaaaaaaaaaaattacccgggtgtggtggcgggcgcctgtagtcccagctactccggaggctaaggcagaagaatcgcttgaacccaggaggtggagcttgcagtgagtcgagatggcgccactgaactccagtctaggcgacagagtgagactccgtctcaacaacaaaaacaacaatataaaagaaagaaagaaagaaagaaagaaagaaaggaaggaaggaaggaaggaaggaaggaaggaaggaaggaaggaaagaaagaaaagaaaagaaacagccaaaataaacaaattctgcaatgcctagcatctcactcacagtagaagccaagtccttacaaaggcctgcaaagcccgacacagtctggttcctgcctacctcccagccccgctttcccagccctcgccctctcactgactctgttccaacccctctggcctcctggtggggcctccagctcacccagcacatgcccaccttgaggacttcacagtgctctttcatctgcctaacagattcgtgcacagttccagcctcacttcatttccctgctctgtcatccaggctggagtgtagtggcatgatctcggctcagggattacaggtgtgcaccaccatgcccagctaatttttgtatttttagtagagacagggtttcgccatgttggccaggccggtctttaactcctgacctcaggtgatctgtccgcctcggtctcccaaagtgctgggattacaggtgtgagccaccacgcccagcccatgctgggcactttgttaggccccaaggtggtgggcagtgatgggtaagacttatgaatggcgtaagccaccacacccggcccctaaacccgcactttgctaactgtttgctttgtgatgttcaggctagttgcctaaactctcggagcctgagagtgaaccacacctatcacaaagggaaagagccttggactccactgggcggtgatgagtaaaagctgctgcaaatgaaaaaggcctcccacagtgctgggagcacggtcgaggtccacaaaacagtagctatcagggtgattcttatgtaaatgctctgaataataataccattaacatttatagaactaggtgtcaagctctgttaggcacccacatcaggcgagatcttctagtccctaactcttcccctaaaaccagcttctgctcgccaagccccactgggaatgaggaggaggggctctcggtgatgcaaatgagtgttgacttttttttaatcaacaaaacaatgagcccttagaagtatacaatggaaatgtttagaatgttgaaaggagagaaatcagttaacaagtgcttattgatacactcacacccagctctacttgtcaataaacatttcccaaagcctgcagattggaatccaggcgagggccctaagggctgtgtgaactggggcctgttacttgaggtcactgtgtttcaggttaatgcaggaaaacagggaagtaatgaggctgacctgttgggtcttcggtgaaatgtgtatgaagagcttgacacttactagaaatgaagcaatttttcttatctaaggaaatcattttaccccaaccctccccacctcactcctacttcagaagtgtaggaggctcccctagattctgagccttaattctgacatcacagagccactttcagtttcctgggggaagacaggaaggaggaataatgtgtggaatcaatactgaggatgctggcctggcgtggtggctcatgcctgtaatcccatcactttctgaggctgaggcgagcagatcatctgaaatcaggagtttgagaccagcctggccaacatggtgaaacccagtgaaacccagtctctactaaaaatacaaaaattagccaggcatggctatgcagtaggtgcacgcctgtaatcccagctactatggaggctgaggcaggagaattgcttgaacccaggaggaggaggttgcagtgagccaagatctcgccactgtactccagcctgggcaatagagcaagactccatctcaaaaaataaaaaataaattaaaaaaagactgaggatgcctagagccactgtgctaggtgcagaacaggctagttaagcaagcaatggagagatacctaaatatatatgtataaatattttttaaatagagacagggtctcactatgttgcccaggctagtcttgaactcctggcctcaagcaattctcccaccttggactcccaaagtgatgggattacaggagtcagcctctatgcctggtggagagatacttttatttatttatttatttatttatttaactcaaagtcttgctgtcacccaggctggagtgcagtggtgtgatctcggctcactgcaacctacacctcccgggttcacgccattctcctgcctcagcctcccaagtagctgggactacaggtgcctgacaccacacccggctaatttttttttaattttatttttagtagagatggggtttcaccgtgttagccaggatggtcttgatctcctgacctcgtgatccacccgcctcggcctcccaaagtgctgggattacaggcgggagccaccgtgcctcgccaattaattttatttttgagacagagtctcgctctgttgcccaggctggagtgcagtggtgcgatctgggctcactgcagcctccacttcccgggttcaaccaattcgcccgccttggccccacaaagtgctgggattacaggtgtgagccaccgaccctggccatggagagatatttatttatttattttttattttttaatttttattttttgagacgctgtcttgctctgtcacccaggctggagtgcagtggcgtgattgcagcttacctcagcctccgcttcccgggttcaagcaattctcctgtctcagcctccggagtaactgggattacacgtgtgggccacaacgcccagctaattttttatttttagtagatatgaggtttaactatgttggccagggtggtctggaactctgacctcaagtgatccacgcacctcggcctctcaaaatgctgggattacaggcatgagctaccgcacctcacctggagagatacttacagaaaaacaaaaacaaaaacaaaaaccttacggtgtttccttatgcgtgaagatattcactacaagggtatgggctgttatgatatgtactggttttctcccatggttcctggctcctgactcctgtatcccttattaatcttttgttataatgtggggtgtgttaggcctcaggaaacagagtctctctcctgccctcctttcaccttcacctgccccaaggcaagactctaatctactcctgcctttctgattatgggttttaaaactctcccagaaaagggtcccaccctacaccctgagggcaggaatgctgatgccatgaagcttccataaaaactcaagaaattcatggctcacacctgtaatcccagcacactgggaggcctaggtgggaggactgtttgagccccggagttccagaccagcctgggcaacatagggagaccccatctctacaaaaaagtaggcaggtgtggtggcgcacgcctttagttccagctgctcaggaggctgaggtgggaggatcgcttgtcccaagaggtcaacgctccagtgaaccatgatcatgccactgcactccagcctgggtgacagagggagatcctgcctcaaaaaaagaacagaaagataaaaagaaggccaggggctgtggctcacacctgtaatcccagcacttagggtggctgaggtgggaggatcacctgaggtcaggagttcaagaccagcctggccaacatggcgaaacctcatctctactaaaaatacaaaaattagcctggtgtggtggtgcgtgcctgtagtcccagctactggggaggctgaggcacaaaaatcatttgaacccagtaggtggaggttgcagtgagctgagatcatgccactgcactccagcctcagccacagaacgagacttcgcctcaggagaaaaaaaagaagaagaagaaagaagaagaagaaggagaaggaggaggaggaggaggaggaggagaaggagaaggagaagaagaagaagagacaagatccaaaaggacaaggtttcagtgagacttcatctcaggagagaaaaaaaaaaaaagagaaaagacacaaaaggacaaggttcagtgagcttctggatagctgaacaggctccttcccccatacctcaacctacgctctgtctaggcgacagagcgagactccggctcaaaatatatatgtaaaataaaatgaaaaaataaaataaaatattgtttctagaggtagagaacggaaacaactcaagtgttcaaagtaggagattgattaaataaatcctatgaggttgatcccaatgtgtagatctgaaataatcttcaatatttattattaattagtaaatatcgatattatcttgtattcatggatagaaagactcaatattgtaaatatgtaaattttcttcaatttgttccatacaaggcaatgcaatgctaacaaaaatcacaacaggaattttcatgaaacttgccaagccaattaaaaaatatgcatagggacgggcgtggtggctcacgcctgtaatcccagcactttgggaggccgaggtgggtggatcacgaggtcaggacatcaacaccatcctggctaacacagtgaaaccccgtctctactaaaaatacaaaaaattagccgggcgtggtggcgggcgcctgtagtcccagctactcaggaggctgaggcaggagaatggtgggaacccgggaggcagagctttcagtgagctgagatcgcgccactgcactccagcctgggggacagagtgagactctgtctcgaaaacaaaaacaacaacaaaaatacgtataggaggccgggtgcggtggctcatgcctgtaatcctagcactttgggaggctgaggcgggcagatcatgagatcaggagatcgagaccatcctggctaacgcggtgaaaccccatctctactaaaaatacaaaaaattagctgggcatggtggcgggtgcctgtagtcccagctactcgggaggctgaagcgggagaatcgcttgaacccaggaggcggaggttgcagtgagccgaaatcgcgccactgcaccccagcctgggcaacagagcgagactccatctcaaaaaaaaaaaaaaaaaaagtataggaagggctcagaacagaaagatactcctgaagaaaaagggagaggagatttgctccaccagaattgttatagagctgtggcaaaaaagatgaggtagtgttgctaggggtaggaagtcaccaaaattaactcatgaatatatgaaactttaataatgacagggtggtatgccagatcaaaggaggtgctcatcaataaatggagatgggctgggcgcggtggctcatgcctgtaatcccaacactttgggagaccgaggcgggcagatcaccttaggtcaggagtttgagaccagcctggccaacatggtgaaaccccatctctactaaaaatgcaaaaattatcccagcgtggtggcacatgcctataatcccagatactcgggaggctgaggcaggagaattgcttgaatccgggggcggatgctgcagtgagcagagatcatgccactgcactccagcctgggtgacagagcaagattctgtttctcccatatggaaagaaaggtcatccatatgggagaagatgaaattaaatcagtgacctgccgggcgcagtggctcgtgcctataatcccagcactttgggaggccgaggcagttggatcacgaggtcaggagttcgagaccagcctggccaagatggtgaaacactgtctctactaaaaatacaaaaattagcaaggcacagtggtgggcgcctgtaatcccagctacttgggaggctgaggcagaagaattgcttgaacctgggaggcagaggtttcagtgagccgagatcatgccactgcactctagcctgggcaacagagcaagactctgtctccaaaaaaaaaaaaaaatcagtgaaaaaatcagtgacccacactatattcaaaagtcaactcaatatataaggacttaattatcaaaagcaaaactaaaactttaaggagaaaagtaagggaatttctttctgaagttgggagtaatgaaaactcaaacaacacaaaaggttaactataaaagaaaatagtaatgaatgaaactatactaaaatgaatgaaattataagctacaaacttgaagaagatatgtgtaaacacatatagccattcaaaaatatatactgagataacctaaaggccttgtaaaaatcagtaaagccagccaggcatggtggctcaagcctgtaatcccagcactttgggaggccaaggtgggtggatcacgaggtcaggagatcgagaccatactggctaacatggtgaaaccccgtctctactaaaaatacaaaaaaaattagccaggcatggtggcgggcacctgtagtctcagctactcgggaggctgaggcaggagaatggtgtgaacccaggaggaggagcttggagtgagccaagatcgcgccactgtactccagcctgggcaactgagcaagactccgtctcaaaaaaaaaaaaaaaaaagaaaaagaaaaagaaaaaatcagtaaagccagcctgtgcaacatagtaagactgtctctactgaaaaaaaaattagtcgggtatggtggtgtgcaactgtagtctcagctactcaggaggctgaggagggaggatcactttagcacaggagttcgaggcttcagtgaactatgtcatgccactgtactctagcctgggcaacagagcgaaaccctgtcttgaaaaaatcaataaatgacaataagctagtagaaaaatggacacaagacttgaacatgcatttcaacaagaacgaaacatggctaaaaagcttatgaagagatgctcaccatcattagtgatcaaggaaatatagattgagatcataatgagatactattttatacccagtatatggcaaaaattaagaagtcagataacaccaagtattgaacaacagatcttctatacattgctggagggaatctgtatctgtacagccattttgaagaagattatcttttttttttttttgagacagagtcttgctctgttgcccaagctggagtacaatggtacgatttcggctcactgcagcctctgcctcagcctcccaagtagctggggactaaaggtgcatgccaccacacccggctaacttttgtattttctggtggagatgggatttcaccatgttgcccaggctagtcttgaactcttggcctcaagtgatccacctacctcggcctcccaaatgctgggattacgggcctgagccaccgcgcccagccaaaaattatcattatcttgtcaaattgaacatttacataccttaaaacccagcagttccatttttgggcaaatatccaggagtaagtcttgctcaagtgttccaggagacatgtacatgaatattcataactgcagtcaacatatgatagaaacactcataaagaaaccaaaatgcccttcaacaggagaacagataaatacattggggtaccttgacaaaataaaatattataaaagagtgaaatttcggctgggcgcggtggctcacgcctgtaatcccagcactttgggaggccgaggcgggtggatcacgaggtcaggagatcgagaccatcctggctaacatggtgaaaccccgtcttcactaaaaatacaaaaagttctccgggcgtggtggtgggcgcctgtagtcccagctactcgggaggctgaggcaggagaatgacgtgagcccaggaggcagagcttgcagtgagcggagatcgcgccactgcactatagcctgggcgacagagcaacactccatctcaaaaaaaaaaaaaaaaaaaaaagtgaaatttcaatgaaccacagccacacataaaagtatgaatgatttttgtcaatacaatatcgagtgtaaaaaagaaacagcttgccaggcgcggtggctcacgcctgtaatcccagcattttgggaggccgaggtgggcggatcatgagatcaggagattgagaccatcctggctaayacagtgaaaccccgcctctactaaaaatacaaaaaattatccgggcgtggtggcgggtgcctgtagtcccagctactcgggaggctgaggcaggagaatggcgtgaacccaggaggcggagcttgcagtgagccgagattgcgccactgcactccagcctgggcaacagagcgagactccgtctcaaaaagaaagaaagaaacagctctagaggattacatacaccattatactcttttattattactttttaaattttatttacttatttatttactttgagacggagtcttgcgttgtcgcccaggcaggaatgcagtggcgcgatcccgcctcactgcaacctccacctcccaggttcaagtgattctcccacctcagcctccagagtagctaggcatacaggagcgcaccatcatgcctggctaattttttggtatttttagtacacaacggagtttcactatgttggccaggatggtctcgaactcctgacctcaggtgatctgcccgcctcagcctcccaaagtgctgggattacaggcgtgagccactgtgcctggctcatcgtcctttctttctaaagcttgcacatacgccatttacggttacagcacaattgaatcaaacaatccctaactactgcagttttttctttttgtttttgtttgagacagagtctcgctctgtcgcccaggttagagtgcagtggcaccatctcagctcactgcaacctccacctcccgggttcaagcgattctcctgcctcagcctcctgagtagctgggattacaggcatgcgccaccatccctggccaattttgtatttttagtagagacagggttactccatgttggtcaggctggtctcgaacttctgacctcaggtgatctacctgtctcaggcctcccaaagtgctgggattacaggtgtgagccaccgtgcctggaaagtttactttttaagttctttttttgtcttttcttccctttctacctataatcctgttaaaaaaaaaaaaagcttttaattaaaaatacattccccggctgggcacaatggctcacgcctataatcccagcactttgggaggcccaggcaggcagatgacctgagatcaggagttcgagaccagcctgggcaaaatagcaaaaccccgtctctactaaaaatataaaaattagctgggcgtggtggcccacgcctgtaatcccagctactccggaggctgaggcagtagaatcacttgaacccaggatgcggcggttgcagtgagccaagatcatgccactgcactccagcctgggcgataagagcaaaactccgtcacacacacatacacgcacccacccaatggaaaaaattgaaaaatataacacaccagcagagtgtataaaacacatgcattcttaaaaaaagtaactagatggccgggcgcagtggcccacacctgtaatcctagcattttgggaggccaaggcgggtggatcacctgaggtcgggagttcgagaccagcctggccaacatggtgaaaccccgtccctactaaaaatacaaaaaattagccgggcattcattgtggtgggtgcatgtaatcccagctactcgaaagggtgaggcaggagaattgcttgaacccaggaggcggatattgcagtgagccgagatcttgccattgcactccagcctggcaacaatagtgaaactccttctcaaaaaaaaacaaaaaaaaaaacaaaaaaaacccaaaaaaatccaaagtaactataagccgggtgctgtagctcacgcctgtaatgccagcactttgggaggcctccgaggcaggcggatcacctgaggacaacatggtgaaactgtctctactaaaaatacagaaaacttagctgggcatggtggctcatgcctgtaatcccagctactcaggaagctgaggcaggagaatcgtttgaacccaggaggaggaggttgcagtgagccgaggtcaggcccactgcactccagcctgggggacagagggagattctgtctcaaaaataaataaatagtaacgataaagcaaacatttgttttacctctaccttaaaaacattttcagtagttgttgttttgtaaagacagggtctgactatgtttcacctgctggtctggaactcctggactcaagcaatcctctttcctcagcctcccaaagtgttgagattacaggcgtgagccactgctcccggccagttgtttttaagtttaaaaaataagtataacaaacacctgtggcctgcgcctgtaatcccagctactcaggaggctgaggcaggagaatcgcttgaacccaggagacagaggttgcagtgagctgagatcgcgccactacactccagcctggcaacgagtaacactctgtctcaaacaacaacaacaaaaacacaccaaaaaaacacctgtgtaccactctccaggaattaacaaacacattctgctatttttttgttttgtttccttttttttttctaacaagaccacaaaacagaaggtacttattctacacacctttttttttttttttttttttagaatgcagtacttaatggtcactcttttgtgagtcacttaatggatcaaggcttttcttatttattgtatgtcatgtgacctcagccaatattctccttttgttgttgttgttttgtgtttgtttgttttgaggtggagtctcactgttgcccaaggatggagtgtagtggcgtaatctcggctcactgaaaactcagcttcctgggttcaagaattttttttaattttttttgagatggactctcgctctgttgcccagactggagtgcagtgacgtgatctcggctcactgcaacctctgcctcccgggttcaagcaattctctgcctcagcctcccaagtacctgggattacaggcgcctgccaagattacccactaatttttttgtgtttttaatagagacggggtttcgctatcttggccaggctggtcttgaactcctgacctcatgatccacccgcctcggcctcccaaagtgctgggattaggcatgagccaccgtgcccggccgaataattttttaattcaaataaaaaagtttgggcatgcttacagtccctccgacagcagtgtgtgcacctagctgcccatacccttcctagaactgggtgtcataattacagtttccttctcataaggttgggatgttttggattcgtgtgtttgcttaagatgtgctgggttcaacccacgaaggctctgtgcttggctgtgttctgagaagttttcagtccttgtggagaggagaggtattctagcaccctctcctagcctcctgggacctcagccacccacaactgccttccagagtttcctcgcagaggttccccagaagagttatttgctaaatctgtcaaccttaccaccacattccctttctgcttaaagatttcaatctccatcaccttttacctagactacagcagtcacttagactcttatcccaacagtccgttgtcagcacgttgtatctggcctctgctcaaagccctcctgctacacttcacattccatctaagctccttagcttggtcttcaaagccctgccagatgcaggcctgatcctcttctaagaccgcatctcccactgttccccttcccctgcagtctcctggtgggttcctggcaggataagctgggtctagcctcagggactttgtacttattattattattattttatgagacagagttttgctcttgtcacccaggctggagtacaatggaatgatcttggctcactgcaacctccacttcctgggttcaagcgattctcctacctcagcctcccaagtagctgggagtacaggtgctcgccaccaggcccagcaaatttttgtagtagagatgggttttcaccatgttggccaggctggtctcgaactcctgatctcaggtgatacacctgcttcagccttccaaagtgctgagattataggcgtgagccaccgcgcccggcccctttgtacttatttacctctgcttaggatgctcttcccccagagcgtctctgttcaaatgtcaccacactagagaggccctcccagacaatcttgtctaaaataatgcctcttctgcccctcacccgagctcatccaccccacttcattttttcataacacgtatcagccattattatatttyattttattcatttattgagatagagtctcgctgtgtcgcccaggctggagtgcagtggcacagtctgggctcactgcaacctctaccccccaggttcaagtaattctcctgcctcagcctccccagtagctgggactacaggcaggggccaccacgcctggctaatttttttttttttttttttttgagacagagtctcgctctgtcgcccaggctatagtgcagtgacggtggcacgatcttggctcactgcaacctccgcctcccgggttcaagtgattcttctgcctcagcctcccgagtagctgggagtacaagtgcctgccaccacgcctggctaatttttgtatttttagtagagacgggatttcatcatattggccaggctgatctcgaactcctgaccttgtgatctgcctgcctcagcctccccaagtactgggattacaggcgtaagccaccatgcccagccaaccatcattattttatattcacacttatttatatgtttgttatttgtcttctcccaccaggaatgtaagcttgataaaaactgaaaccttgagtgttttacttgtttgtgtttccaacattatctccccagtgcctagaataatgcctggcacatggtagatggactcagatgctagacctggatttgacaaggtgtactgcacagcagttaagagcacaaatgtagctgggcacagtggctcatgcctgtaatccctgcacttcgagaggctgaggcaggaggattgcttgaaaccaggagttgaaggccagcctgggcaacaaagcaggacctcatctctctcttttttttatttttatttatttattttttttgagatggagttttgcttgtcacccaggctggagtgcaatggcgcaatcttggctcactgcaacctctgcctcctgggttcaagtgattctcctgcctcagactcccaagaagctgggattacaggcacgaaccaccaagtcggccatttttttgtatttttagtagaggcggggtttcaccttgttggccaggctggtctccaactcctgacctcaggtgattccatctgcctccgtctcccaaagtgctgggattataggcatgagccactgcgcatggcaagacctcatctcttaagaaaagtcagccagccatggtggctggcacctatggtcttagctactcaggaggctgaggcaggaggatcacttgagcccatgaatttgaagctaaagtgagctatgatgcccaccactgccctccagctccagtctcggcaaagagtgagaccatctcttggggaaaaaaaaaaaaagcacaaaaatgagtcaagtccctctgggttgacagcagtccctgtgttgttctttttcagctccgtaacttgcgacgttacttaaccatccttttcaccatctataaaagraggatggtaatctattttttttttttttgaagcagagtttcactctcgttgcccaggctggagtgcaatggtgcgatgtcggctcaccacaacatctgcctcccaggttcaagcaattctcttgcctcagcctcctgagtagctgggattacaggcatgtgccacaacgcccagctaattttgtattatcaatagagacggggtttctccatgttggtcaggctggtctcgacctcccgacctcaggtgatccacccatctcggcctcccaaagtgctggaattacaggcgtgagccaccacgcctggccgacaatctatgtaacataattgtgagaattaagtgagttaattcatgtaaatacacaggttggtgcttagtgcttgtcattattatacttcttgagtgaatttaacacatagtatccaggtgcagtggctcacgcctgtaataccagcactttgggaggccgaggcgggtggatcacctgagcgggagtttgagaccagcctgactaagatggcgaaaccctgtgtctactaaaaatacaaacaaacaaacaaacaaaaatattggccggacatggtggtgtgtgcctgtaatcccagctaccctggaggctgaggcaggggaattgcttaaacctgggaggtggaggttgtagtgagccgagattgcaccactgcactccagcctgggcaagggagcgagactccgccttaaaaaaaaaaaattagcacatatgagctattgccgtcatgcaacaagcaggcatcaaccaagcccaaggtgtggatatttatgatgtgcgtggcactcccccagacagtggacatagatgggcatgcattaaagtgaacgagacagaggtaaacccaaggaattattcgtagagtgcagataagcaaaaaaagcagactgttacaggagatatagcgtagtctgagggcaggaaaggcttctggaagcagtgactttgtcctaggactaaggatgtgtaggttgtaactgcatggaaggaaagagagaagcaagtgtgagaaagctcagaacagagaaaagaacctgcagagagacagcagtggctggagtgcagggcactgggagagatgaggctagataatctgccaagggcttatcacgcagggcccaggggcctcggaaagggttttcacaggagccatgaaaggacctgaaggagagtgactctgtccgatctgcagtgagacaagtttcccctggctgctgtgtggagacatcttcttcaggtctccatccaactttcacttcaccagagtccccctggtttaaaagggcccctcccctgcccctctctacctgctttataatgtaattgccctcgccattccctaacattatgtcacgctctcaattgctggttccgattcccccactgcaatggataccacacgggaactgggttttggtggggcaggagagactggccacacaaagatcaattaggagggtggtacagcctgcttcggatccagatttttgacttgccaggggggttaggagcagctgttgggatggaagagagcaggaggcaggactcagttcacctggaaacttcatttgcatagcactttacataagactgagaaacatcaactgtccatatcaaagaatgggacggggaagctattggaaaccatggtggtggcgctaaagtttctaaccagccagttcttggggttataaatcatcaagggcttaagtatctcccataggagtgaagagaaacagatagaatggagaagtgtttaaaatgtaacgcacaagacttggcgtctggatgtggggcatgaggaaaagggaaagtgatgcctacatttctagcttgagcaattgagtggatggtgccatctcctcagagcagagggaggaggagcaagttttgtggttcagatggtgagttcacttttttttttttttttttttttgaaatggagtctcgctctgttaccaggctggagtgcaatggcgtgatctckgctcactgcaacctccgcctcctgggttcaagcaattctcctgcctcatcctcccgagtagctgggactacagatgcctgccaccacacctggctaatttttgtatttttagtagagacggagtttcaccatgttggccaggatggtctcgatttcttgacctcgtgctccacctgcctctgcctcccaaagtgctgggattacagacatgagccaccgcacccagccttgttttgcccaggctggagtgcagtggcatgatctctgctcattgcaacctctgcttcctggttcaagcgattctcctgccttagcctcccgaatagctgggattacaggcgtgagccaccacacccagctaattttggtatttttagtagagacagggcttcaccatgttggccacggctggtctcgaactcttgacctcaggcgatctgcctgccttggccttccaaagtgctgggattacaggtgtgagccaccagcctggctgtgagttcactttggatggaggagtccaaggttcctagggagcctcctgcatgaggattccaggagttagaggattctgagctggggatagtccttaagagatggtagttggaataaacatggaaatcatgagaaattactggggccttagagattaatgccccttttttttcccctgagatgtctttaggcaaatcaccagaaatgcttatatgggagtgctttccagttacaacctggcttctccacctcaccttgatggttctgtaacccccagccactaatagcaatggaaggtccattaaagggaggagtcctggaagctgaagcttcattagttttacaatatctgcctcagcccttgaagacttggatgagaggaggcagttgaggcaagaatccttagcagccccaccaattgatggagggggccagaagtgtcctgtggggagagggagaaggaaagggagtggccagggaggtgggaggagcctgggaaagactggaatcacagaaggaaccatgtttagaggatcatcatcactagcaatcaacggccaagttctgctaatttttcctttagtctctacccccatctccactgccacctcctggccaacagctcccattacacacaggtgactgctggtatcctccctgtctttagccttacagacatatcacgcatcttgttacatacatcacccttcataaagtggaacatgggtcatgccaatctttttttttttttttttgagatggagtctggctctgtcgccaggctggagtgcagtggcacgatctcagctcactgcaacctctgcctcccgggttcaagcgattctcctgcctcagcctcccgagtagctgggactacaggcgggggccaccacgcctggctaatatatatatattttttgagacagagtcttgctctgtcgcccaggctagagtgcagtggcggtggcgcaatcttggctcactgcaacctccgcctctcgggttcaagcgattcttctgcctcagcctctggagtagctgggagtacaagtgcctgccaccacacccggctaatttttgtatttttagtwgagatgatggggtttcaccatgttggccaggatggtctcaatctcttgacctcgtgatccgcccgccttgacctcccaaagtgctgggattacaggtgtgagccaccgtgcccggcctggatcatgccaatcttttgcttaacaactttcaatagctccctgtcacttccaaacgaatgccccatacctagcctagcatgctgggcccttagccgcttggagctaggtgatctctccaacagtgtctcaacccgctccctcataaagaagacaagctggggccgggtgtggtagctcacgcctgtagtcccagcactttgggaggctgagacaggagggttgcttgaggccaagagttcaagaccaacctgggcaacatagcgagacctcccactttcactacaaaaaaataaaaaatagccaggcctggtggtgtgcacctgtagtctcagctacttggaaggctgaggtgggaggatcacctgagcccaggaggttgaggctgcagtgagctatgatcgcaccactgcactccagactggggcacaagctgattcactgtcccccattccccgccctcctccggcaaccatcagccttgtggaggctgtgtcatcttcctggagtgcctgccttcatgcctaaatttttcaaggccaggctcaaatgatacttccctaggaagccttccctgataccccactgggtatccaacctgacccttggagagttccttgaccacccttcttttgagacaccgcaacactgccatgccttttaccaagctcacagctcatcctgcaatgagactaagttcttaagagcagggactgtgccatcttccctcctctctcccactgcacacagcacagggccagataggaaacaggcagaggaaatgctggttaggagaacatgctcgttgacacgcttgtgtataaacaagaggtcacaagtttaactgcctttaggtgccagatatgacaaatgtgttaagttgccccgtgcaaaacaattgggaatggtggggcctacggcacatcggagacgtcattctcttgcctgaagtaatttttcttttcttttttttttttgagatggagttttgctcttgttgcccaggctggagtgcaatggcgtgatcttggctcaccgcaatctctgcctcccaagttcaagcaattctcctacttcagcctcccgaatagctgggattacagacatgcgccaccacacctggctaattttgtatttttagtagagacggggtttctccacgttggtcaggctggtctcgaactcccgacctcagggtgatccacctgactcggcatcccaaaggtcaagagacttagcatcagcgtgaagccaccagtcgtccacacgttccattaccatttcatccatagtactccaggacatccctgaaatacgcctagggatcaacacagcagcggtgcacatggcagaaccctgagcctcaagtaagatacgccagtaagcaaaaagtgagaaggacaggagcgtcatcgcacgacgatatacacgcaggcagaggaaccacgcagactaccctgaaaacgacagacaaaaaccagagacacaacaagcgaggccgtcacacaaaagagataacaggagcatcaaacagagcccctgacaggctgaacacacgagccatgaggatcactcgaaatagagaccggcggaaaagcccaaccagtgactgcgagagaaacagaaacccgagacaccacaccaccgacaaaccgaaaaaacacccgcagaaacacaacaaaaccaagacagagcaccacacaacaaaaagaaaaaacaacccacacgaagacagatccacacagaaaccaacagcgaacaccaacgaaagcatgcgacaacacaacacggaaccataccaaagacaaaaaaaaagcacacaccccacgaccccaaccacaacagcacaccacgaaagacacgtacaacacaaaaaaagaaaagaacaacgtgcgaaaaaaaacacaaaacaacgcgaccaaaccaagcaaaccccgaaaagaagagaagaaaacataaaaaaacacaccagcgacaacaagctcaaaaaacacataaaagaaaacaacgagcgcagaaaagacaagcacagaccgcaaacacaaaacaaacaagaacaagtaaagacacaaaaaaagcaaaaacaaataacaaaacaacacagacacgaaaaccacagcacacagaacacacaagagaagaacgaacaagcaacaaaaaagaaaaagatcaacgacaccaaaaaagaacgaggcacaaaaccnnnnnnnnnnnnnnnnnnnnctctctcctttcttcttttttagtggcgacgggcgggcagcggtttgttctgtctttttctctcctcttttcttttcacttcttttttcttcttcttcttgtgttcttcttcgttattctctgttgctcggtgctgctgtttttatttctctcgtgtggtctgttttgcttgtttttgtcttttctgggctccggttcttttcttctctgcgtgcttccttcgcgttgttgttgttttttttgcgctttttatctcctttcgtacttttcctggggttgcgtttgtgttcattgttgtgtgttgtgtgttgccatgtttttttttgtattcatgttttcttggcttgttcttctgcgcctggtgtgttctctagtctttcggtggtttcttgtcatggagttttgagtctgtcgttctcttgtttttctttgttttcttgtgtcccttctgtcctacattttttaaccccgtctctaggccaggcgtggtagctcacgcctgtaatcccagtactttgggaggcccaggtgggcggatcacgaggtcaggagatcgagaccatcctggctaacacggtgaaaccccgtctctactaaaaatacaaaaaattagccaggcgtggtggcaggcgcatgtagtcccagctactcgggaggctgaggcaggagaatggcatgaaactgggaggcggagcttgcagtgagccgagattgagccactgaactccagcctgggggacagagcaagactccgtctcaaaaaaaaaaaaaaaaaaaaaaaagaaaccccggctctattaaaaatacaaaaattagttgggcatggtggccagtgcctgtaatcccagctacttgggaggctgaggcataagaattgcttgaacccgggaggcagaggttgcagtgagcagagatcgtgacactgcactccagcttggggtaaagagcgagactctgtctctaaaaacaaaaaacgaaaaacaaaaaacaaactatataaagcagctgggggcggtggctcacacctgtagtcacagcactttgggaggctaaggtaggtggatcacctgaggtcaggagtttgagagcagcctgggcaacatggtgaaaccctgtctctaccaaaaatacaaaaattagctgagtgtggtggtgcacacctgtaatcccagctacttgggagggtgagccatgagaattgcttgagcccgggagacagaggctgcagggagccaagattgtgccattgcactccggcctgggtgacagagcaagactatctcaacaaatgaatacataaataaatactatgtaaagcacatcagaaagctaaccttgaccttaagatcatgggtgtgaaacactgaactatagtgaaatatactccacatttaggtagtcctttagagcttttttattttttcataattttaaaatttttaatttactgtagagacgacgtctcactatgttacccaggctggtcttgagctcctggcctcaagtgatcctcctgccttggcctcccaaagtgctggggttacaggtgtgagccaccgcacctggccctttagatctttcaaagcaattttacatcagcaattctatcctcactttacagaggaaactgaagctcagaaaggtgaagttaattgctcaaggtcacatagcaaggagttaatggcacaaggctaggtccaattcaggctctggcctgggatcccctcttctgggggtgatgggaggagggtctagaaaagatgggcatcatccacttttctttcaacccaaacttcatctgtaaaatgggaccaacaatcctcttcgcagggaagagctaaactgaatggaggaaggggagcttcatcagggcttcctaacctggcctcttagcgggggctttaggtggtaaaattttatgacagcgagtgcattcttgtggcttagactgcttggctaggaatcttgacttcaggatctgtcactgtgttttaacrcctgagcctcaattcgtttgtaaaatggagcagttaggattaaaagaaataatcaaggcaccaagtagtgtcagtagaaggtagctgttatttattgtyctattctggggtaaaggtatcagattctcaaagggattcttaatctagaaagtttgcgaagagatggcaaaggtgtttgaaagctatcaggaaaccaycctcgcgtaaaacgaagcagcgctacagaagtgggctgccatgggaatcgggaggcccaggttccactgctaacttgctgcagcttactgggtgatctgtaaataaaaagggaggtggcggtggtccgagctggcagccgcaatgcagccccaggtagatctaggggcaaacggtaaaggcgctccgaggaagggcgagcgcgcagcctcygggagactacacctcccaggctgccttgcgcaccgtgctgcaccctacgctagcacgcgagcctccccgttcccccaccctccagttactgtctctcgcgagaagacgggccgcgccggcgatagcgattccgagcgagtggtggtggtagtggtggtggtggcggccgagacggcggcggccattttggtgaggcctcgggagcggcagcggcggttcgctgggagtagcgtctgccctttttcccacccaccgtccgcatctgtgtgctgcgcgaagaggcagtggaggcaaggcggtggcagtagccgcagtctccaggggagtttaaaggccgcgaaggcggtggccaagagggggccctcccccctcctaggcgggagggggggtggtgcgcacgcccccgaggacgcaggtaaggagagggagacaagatggcgaacgccccacagttccccctcccatgacggctgactgcgcgcgcatctttccgccaccgcctcccccccaccttcccggggtgctgcgcgcgcaccctcwgccggggccccggggccggtgcgcgaggctgtcggcgcgcgcccatagagacagactgagggggtcaggccggccggcgctgggccccggcgtgtctcctctcccttcccgcccttctgcgcacgcgtgcctgagcgagcgagcgagcgagcgagccctgagaggacggacccaggtgcgctcctgcccgcccaccaacccagtcacccctcaggggcgcgcgggaagaggaaggggggcgtgggacgagtagtcggggcgcgcgcccaccacatctagccgggggaccaggacctggtggcacgaaccctcccttctctcagcctttcgcggtcgggtgatgggggggctccctgacgggcttggatgacgagcttcccagccccgcgacccttgtgtgcgtgggctcgggttctggcgggagcccctgggccgtgcgcgcagccggctcgctccgcctccagccgcgcacgcgcgggcccctcccccgcccggcgcgcacgttgggtggggtgggagtctggagggggcggggctatctcagggctagtggcaacttgggcagaggtcaggggtcacgcgaggtcagtccgtcgggagggctagggagatggtcacgaaacctgaagtcaagagttaaggcttgttggcttctggtgagctcgggtcttgggaacgtgtggcggagtagggagtgaatcaaagccggcactgtggtttaggaatttccttaaacactggggaagcatttccgggcctcctgcgggttcacactgcctgtttccggcgcgtggttcttggcagtgcggcctctcgcttttgactgctcctgagtctccttttgctgtggttcttgtatttggggaagtgtctcaaggcgcaggtatgggatatacagcgccctgccctgaatcctgggcggattttcctgtgaccagcctgtttgttgactcttcccgggagttccactctcacttctgcgttcagccctcactggaaaggcccgcaggcaggtagcacctttctgaggttctggatgtgacagcttttttttgctgtattttttttttgtcttccattctgtggttggagcctttacacttaaaatttttgaactttctttcttcactcctttcctgctcctgcccccaggcaggatcgtatgtccctccggaattcacaaaacatgatttgcatttccctgaaatgtgagattttcctactactgtagtttttctgtttctagtcttttaactgatttgggtatatttaaacgtctcaaaaaactggagtaaataatacgctttgatggatgtttcaggtgtgattcccttcagtacggcggcaccgtggaagtgcagactttcacagggggtgtggtctcagctcacacaggtgagggatctgctaccattttgtgtgctgatgctaatgggagaaatgtttgagataaagcaattataggtccgtattggggattttcactctagagaagcatgggaatgtttgcatgtgatttttctgtagagggtttgattatagtacaacaacagaactgaggctgtgggttgaggaaaacgtggtcaacctggctctaccaggaagagtagcaggttttccttggttttggcatcagactgtggattgaagccctcctaycacttttttactgtgtaaccttccgcaaatcataaggtcttaacttcgtaacttacaaaacagattatattagaatgtaagctacatttaggtcgggaatcctttctgcatggctmtatccgttgtgtgtaggaggaagtcaatatttgttatgctgtgaaaagcacttggtttttaaggtaggtgtgaggattatagaacacatcaaacaggtactaaaagtatcttatacatagtaagtgctcaagaaatgtaacctgtaatttctgtgtttctctttattcagtgttatttctggttttttaaaaatactttttcatcccctttaactgcatttctgtctttttttttttttttaaccctactttaggtgctccagaggctggtggacctgagcggaggctgggacgccctggtgggccccgggccctggaaggcgggtcccggtggccggtggcccagaatgaggccagctcccagcatgccctgcagccggacgccagcccctcggccagcagtactggtgataacaacccagtcattcttcaggcatccaagggggagcctgggagtgggaccatgcagagcagcccctcccctgctcaccctcagctcccagtcctacagacacaggtttgaaagtgggaagagttccttctctgcttctgctttgtggattgttgagtgtgaggcagaagaaatgtgkcaggggaatatttgtggagagttttggagaatctttggtgctcgggggmtgggctgtagtatatcaggtctgttggatactcacattccatttaacattagtgtaatattatctccaagagtgtaaaagcgcytcgttacctgaaaaaggttgaattaggctaggctggaaatggaggtcgtggcaccatgcttctaataccatacgctttaagaatagtttaacttctatcagtactggagtaggataagcctatggatggtgtgtagtgttcattcctttctcataccaaggaagggtgtggggtaggaaaaaaagcatgacttttaaacacatctaggtgtgtgtacagtcagctttctattttaattttttaaatttttctataaaaagggtttctttattgtgtcatccttgcacaggggccatgctaatcttttctgtatcctcccagttttagtatatgtgttgccaaagtgagcagtacagtaagcttttcatgtttgtaaagttggtatttatagttttcctgagaaactggggaaatttgtgacatacagtcttgtcatttagccgaggtaggaatttgagtggcgcagtgtaaggcttatgtcctggagtgaatttgtgaattccctgagtatccacctttcagtaggactttgttttccatttttttcttttctttttttttttttttgaaatggagtgtctttcagccaggctggaatgcaatggcgcgatctcggctcactgcaacctccgcctcctgatttcaaacagttctcctgcctcagccttgcgagtagctgggattataggcacccaccatcatgcctggctagtttttatatttttgtagagatggggtttcaccatcatgttggccaggctggtcttgaactcctgacctcaggtgatccacccaccttggcctcccaaagtattaggattacaggtgtgagcccccaggcctggcctattttccatttctttctttcttttttttttttttatttttaagatggagtctcgctctgtcaccaggctgaaatgcagtggtgtgatcttggctcactgcaacctccgcctcccgggttcaaacaattcttctgcctcagcctcctgagtagctgggactacaggtgcgcgccaccacgcctggctaatttttgtgtttttagtagagatggggtttcaccatgtttgccaggatggtcttcatctttgacctcgtgatccccgccttactcagcctctcaaaagtgctggaatgacaggtgtgaaccaccgcgcctggcccagagtttcgcttttgttgcccaggctggagtgcagtggtgtggtgttggctcactgcaacctccacctcctgggttcaagtgattctcctgcctcagcctcttgagtagctaggattacaggcgtccgccaccacgcccagctaattttctgtgtttttagtagagatggggtttcaccatgtaggttaggctggtctcaaactcctgacctctggtaatccacccgcctcagcctccaaaagtgctaggattacaggtgtgagccaccgtgcccagccctgttttccaccctccttccctccatccctcccttccctccctccctccctcccttcctgccttccctccctccctccctccctccttccttccttccttccttctctccctccttccttctgagtgcaatggcacaatcttggcttactacaacctctgcctcctggttcaagcaattctctgcctcagactcctgagtagctgggattacaggctcacgccaccacacgtggctaatttctgtatttttagtagagatggggtttcaccatgttggtcaggctggtctggaactcctgaccatgtgatccgcccgcctcggcctcccaaagtccaccgagcccagcttccatttcttaatgcttttgcagtaccttgtaaagtgacgtgttgggtgtttgagaacattggctatgcctgcagcccatgcctgtccagtgaagaggttaaggtggcctgggatttattggtggctgttgaatttagtggtagctcacatttattgcataagtgagtttgccacacttgttctgaaaatggagggtaaatagggagttgtttatgtgcatgaaatcactgaggctctgaaacgatcagaatttgaaatcatatgctatatatatatatatatatgtatgtatataaattttttttttccttttcctttccgagacagagtcaccctgtcatccaagctggaatgcagtggcgcgatctcggctcactgcaacctccgcctcccacgcctcccaggttcaagcgattctcgtgcctcaacctcctgagtagctgggattacaggctcccgccaccacgcccagctaatttttgtattttcagtagagacggggtttcaccatgttggccaggttggtctcaaactcctgacctcaggtgatccacccaccttagcctcccaaagtgctgggatcacaagcatgagccaccacccccggcctatatatatatatatttttaagtttgggaactgtgtaaatgtcaggacataattcttgcatgtcaagcatctataaacttggctctgccatcttgagtcccttattaaaactttatcccaaggccgggcgtggtggctcacgcctgtaatcccagcactttgggaggctgaggtgggcggatcatgaggtcaggagatcgagaccatcctggctaacgtggtgaaaccctgtctctactaaaaatacaaaaaaattagctgggcatagtggcgggcgcctgtagtcccagctgctcaggaggctgaggcaggagaatggcatgaacccgggaggcggagcttgcggtgagccgagatcgcgccactgcactccagcctgggcgacagagcgagactccatctcaaaaaaataaaataaaaactttatcccgaacgtttgtgtttatgaaaataaggtttataccttactctacacagttttttcttgtgaagatcggatgaaataatgtatctaaaacactcagcacagtgcgaagcatttattttctccatcattttcctcttttctagatggtgtcggacggcatgacaggcagcaatcctgtgtcccctgcctcatccagttccccagcctctagtggggcaggcggcatctccccgcagcacatagctcaagattcctcactggatggacctccaggccccccagatggtgccacagtgcccctggaggggttcagcttatcccaggctgctgacctggctaacaagggcccgaagtgggagaagagccatgccgaaattgcagaacaggccaagcatgtacgtattagaaaggcttatgaagattcttgggagttatcttccgtaaactcccacgtcctcttgagtattttatgtttcttttcttttttgtcatggatttagggtataggttctgccttaatgtatatgatcgtgagcaaactgcttgaatattgagtctcattttccttgctgtaaataaaataggaatgatataatagtttataggctattaagaggtttaagttataggagcaaggccaggcgcagtggctcacacctgtaatcctggcactttgggaggctgagacaggcagatctcttgagcccaggagttcaagaccagactgggcaatgtggtaaaaccccatctctgtaaaaagtacaaaaaattagctgggtatagtcgcacatgcctgtagcagtcgcagccacccaggagcctgagttgagaggatcacctgagcccaggaggtcagggctgcagtgagccacgattatgccactgcactccagcctgagcaaccgagtaagatcctgtctcaaaaaaaaaggagaaaatagacacaaaagcactttgtaaactgtgatgctcttaagatttactggtttctatttatttctatcgtgcagtctgtattacatttatccagtggtaagtgtggtctctgggccagcagcatcagcatcacctgggaacttagtagaaacacaaattctttgccgggcgtggtggctcatgcctgtaatcccagcactttgggaggccgaggcgggtggatcacctgaggtcaggagttcgagaccagcctggccaacgtggcaaaatcccatctctgctaaaaatacaaaaattagcctggcgtggtggcgcaggcctgtagtcctagctactcaggaagctgaggcagggaaattgcttgaactgggaaccggaggttgcagtgacctgagatgatgccactgcacaccagcctgggtaacagtgagactctgtctcaaaaaaaaatgcaaattcttggtacctctcacccaccgacccatttgaaactatgagggtagggcccagcaatgtttttattttttatttttatttttattttatttatttattttgttgagacggagtctcgctctgtcgcccaggctggagtgcagtggcagaattttggctcactgcaagctccgcctcccgggttcacagccattctctggcctcagcctcctgagtagctaggactacaggcgcccgccatcacacccggctaaattttttgtatttttagtagagatggggtttcaccatgttggcgggatggtcttgatctcttgaccttgtgatctgccagcctcggcctctgaaagtgctgggattacaggcatgagccactgcgcccggccacaattgggtttttttttttttccttgagacggagtctcagtctttcgctgaggctggagtgcagtggcatgatctcggctcactgcaagctccgcctcctgggttcacgccattctcctgcctcagcctcccgagtagctgggactaagcgctcgccactatgcctggctaattttttgtgtttttagtagacacggggtttcaccgttttagccaagatggtctcgatctcctgaccttgtgatccacccgccttggcctcccaaagtgctgggattacaggtgtgagcacaacctgtttctaaaagtcctccagatgattccggtgcctcctcaagtttgagagcagctggtctaatatccacgtctttcttgatgtttccttcactgtcaggccatttagtcctgtctggtctctggctgtcattttctctgatttagtttttatcaggagaggacagaaataacaaagacagaggctgggtgcggtggttttcgcctataatctgagcattttgggaatcccaggcaggcggattgcttaaacccaggagttccagaccagccttgacattgtgaaacctcgcccctacgaaaaatacaaaaaaattagctgggcatggttgcatgtgcctatagtcagtctcagctacctgggaggctgagttgggaggctgagttgggaagataacctgagcctaggcagcagagtgagacccagaaaaatctcactcagatttctgagtgagattcagaaaaagaaataaggcagttgtcctgaattttttgagtcgtctctgtcaaaaaaattttaaatgctttttaaataaaagacaatcagtgtagaagctttagtaaaaatgaccactcttttttacacctaatcagtgttaaacatttcacgtataacgtttcagtattttttacataaacatatgcatttttacaaaagtagtatttttaaaaacaacagtgtgtcagttgggcattatagcatatttctaagcttaatgcatcatgaaaatactctgagtaagtagaattctacaatgatgatgaccccttgtatctagaatcaagagggaagtatgtgttccctactcctctgggaagctcctcttgggatatgatttcccaagtctctcctatgtctatggggtgtggagattgtgttaaataatggaaagagcatgaaatttgctgtctggagtcctcagacctatttttgattcacattttctattactttctagctgtgtgatcttgggcaaatcacttaatctccctgatcttttttccttcttcatctccctgatcttttttcccttctctgaagagagtatgatacctgcctgtaagtttggtatgtggactaaacataagcataacacactcagcccacttagtgctcaggaattcagccgtggcagtgagatggagtgtgtgtttagaactgttgattgatctggctctccctgattaggaggccgagatcgagactcggattgctgagctgcggaaggagggtttctggtcactgaagaggctgcctaaggtgccagagccccctcgccccaaaggtcactgggactatttgtgcgaagagatgcagtggctctctgctgactttgctcaggagcgccgttggaaacggggtgtggcccggaaggtaggtcttccgctgggacttccttccttttccttttcaggtctgttccttcccggtttgttggaaggggaccagacagaatggtgtaggcattaagagcaaactcttgattttccagatttcttggccttgattattttctttgcctttgggtggggaagtctggctttgagtgttttcaccytgggtcttcattcccacaggtggtgcgcatggtgatccggcaccacgaggagcagcggcagaaagaggaacgggcccggagggaggagcaggccaagctgcgtcgaattgcttccaccatggccaaggatgtcaggcagttctggagcaatgtggagaaggtagacagtggggatcaggaaaggaaaatggccttggattagattggtagatggcgtggtagtaggaatgatcaaaacttcttgagggagtaaatataatttcaggcaactctaatgacgtttatgttgtatggataaaaaagtatagtggcaaaatatgggtcctgcctttggggattgttaatagttctccttgacacctctaggccatctgtcccttgcagggcatttagcatgtgtttactgaaatgtatttgtgccacttagcacatgcttaaattccgtcaaagttcccactgcctgtatagtaagttgtaattatttcttaagtactacccagtttccgtctgtattttcggtcttgcctcctgccatgttcattccttctcccttccactccacacccacctttcttttgtatatctctgtccatttacacatagactttatgctgctgggaatgcttttttcctcatgtgtacttagggaacagccacctattttttaattgtcttggacagagtcttgctgtgtctcctaggctggagtgcagtggtacgatcacagctcactgcatcctcaacctcctgggctcacgcgatcttcctgcctcgatctcccaagtatctgggactacaggcgcgtgctaccacatcttgctaattaaaaaaattctttttaatttctttttttttaatttttttgtgaaacagagtctcaccccgtcacctagggcagtggcgcaatcttggctcactgcaacctctgcctcccaggctcaagtgattctcctgcctcaggctctggagtagctgggattacaggcatgtgccactatgtctggctaatttttgtatttttagtagagacagggttttgctgtgttggccaggctggtcttgaactcctgacctcaggttatccactcgccccagcctctcaaagtgctgggattatagacgtgagccaccgcacctggcctaaaaatatttttttgtggagacaaggtctcgctgttacataccaagctgatcttgaattcctaggctcaagcgatcctctcactttggcctcccaaagtgtgagccactatgcctggcttcacctacctgtttttttgtttttgagacggagtctcgctttgttcccaggctggagtgcagtggtgcaatctgggcttactgcaacctctgcctcccaggttcaagcgattctcctgcctctgcctccggagtagctgagtttacaggtgcccgccaccacgcctggctaattttttatttttagtagagatgggggtttcaccatgtcggtcaggctggtctcgaactcctgacctcacgtgatcctcccacttcagccttccaaagtgctgagaatacaggcatgagccactgtgcctggcccacctacctattttttgagacccagttccagctgggtgtggtgatgcatgcctgtagttccacctacgtgggagggtgaggcaggaggatcatttgagcccaggagtttgacactagtctggccaacatagtgagatctcatctctttaaaaaaaaaaaaaaatccagcttcagattgcaaaccttccctccacctgaggcgaagctggctcttcttcctgcatgctccctttgtgcttcctttagaccatagtgagcccctaaggttatttagttttactttcctaagaggccagcccaggatctggttaaagaaggtctccctaaacatcgggtaaaagtacataaataaaatggttatcttggtgagcrgtccctttcacatctgtggcaggtggtgcaattcaagcaacagtcccggcttgaggaaaagcgcaaaaaagccctggacctgcatttggacttcattgtggggcaaactgaaaagtactcggaccttctgtctcagagcctcaaccagccattaacctccagcaaagcaggctcttccccttgcctcggctcttcctcagctgcctccagtcctccaccccctgcttctcgcctggatgatgaaggtgtgtgttctctttggtcctgttactcttcctcatgtaccctttccagagctgaaaaacccaccctgtggcttgcagggcccgtggactttgtgaccttgttctcctgctatagatggggactttcaaccccaagaggatgaggaagaggatgatgaggaaacgattgaagttgaagaacaacaggaaggcaatgatgcagaggcccagaggcgtgagattgagctgcttcgccgtgagggagaattgccactggaagagctgctccgttcccttccccctcagctgttggaagggccttccagcccctctcaaaccccctcatctcatgatagtgacacccgagatgggcctgaagaaggtgctgaagaagagccccctcaggtgttggaggtataggcagaaggagcagagggagggttcagagggggaacagagggagaggttcagggtctgagttccsggctgtgaggttggttatgagttttaggagttctgctagtaatggacatttgggctctttggggatgactggggaagaatctgtttggggcaagttgcattttgtgattggcaggttttggcgctatagtggaagagcgtattgcactttcctctttaaattgctgtgtggtcttgaaaaagtacttcctctgaccgttacttgccacttctctgaacatgccctaatgttcccttattggcttacaggttggaagctggcatggtacccttaagtcttttctgtttctccatatgtctcaagtgcatggggaagtgttgggtgcctttatttgttacctggcactttcacagttccttccccaggcagtggggccaggatttggtagctggtgctgagagaaaacccttgattgtattcttgccctgggattataccagtggcaactgtcactcaatgggacagtgattctcctgtgacacctttttcaagtttgtgccattcttctgctactgtaaccttagacccttcccttttttatcttttgccatacagataaagcccccaccctctgctgtcacacagcgcaacaaacagccttggcatccagatgaagatgatgaagagtttactgccaacgaagaggaaggtcagggctgttcggtttgtcctattgccccttaccccttgaatgaattgtctggacctaacctttcaggctttctcatctgtttcatttggactgtgtcctgtgcctctagcctctatccctattaatcttgcttctgtctctttcctagcggaggatgaagaggatactatagcagctgaggaacagttggaaggggaggtggatcatgccatggagctgagcgagttggctcgagaaggtgacatttaccagacattttactaagcatccacttggtgtctgcggtgtgcagtaccaaggataaagagatgaataaggcactttgtatccaccctggaggaattccatgtctaatgactaagacagacttgtaaaccagtaatgataagtagaaagtgatgagtgcttatgatagaagtttaaatggtgatgtgggagtgaaatggagggaagagctaatgtaggaagatactgacagcatttgacctggaccttgagaggctcaccaggttgataatgttcttcccaattcccatggtacttcccccaggttgtggggcttggctttgctagctgatgctgaaagtaagctcttttgcctcccctcagacctgggcctagcagtatctacagagacctaggtaaaattaactggtactactcagacctccccttctccctcccctcagagcaaccaaaagctttttgtttctcttccaggtgagctttccatggaggagctattgcagcagtatgcaggagcctatgccccaggctctgggagcagtgaagatgaggatgaagatgaggttgatgctaatagctctgactgtgaaccagaggggcccgtggaagcggaagagcctcctcaggaggatagtagcagtcagtcaggtgaatatgtggtcatgaagcaggagctggrgagggtggccattggaagagcaggtatgatgagcagtaagccttggtcttaccctttagactctgtggaggaccggagtgaggatgaggaagatgaacattcagaggaggaagaaacaagtggaagttcagcatcagaggaatctgagtctgaagagtctgaggatgcccaatcacagagccaagcagatgaagaggaggaagatgatgattttggggtggagtacttgcttgccagggatgaagagcagagtgaggcagatgcaggcagtgggcctcctactccagggcccactactctaggtccaaagaaagaaattactgacattgctgcagcagctgaaagtctccagcccaagggttacacgctggccacgacccaggtatccccaggttctggcctctcctttctcatgtcttgactttctcatgtccccacaacaaatgcctcatttccattgtgttacctatatttcctctctgacaggtaaagacgcccattcccctgcttctgcggggccagctccgggagtaccagcacattgggctagactggctggttaccatgtatgagaagaagcttaatggcattcttgctgatgagatggggcttgggaagaccatccagaccatctctctgcttgcccacttggcttgtgagaaaggtaagtaggcaaggccccttcttttgttccccctagtctagckccctgggagcttgttcagtgatgactccagcttcattgacttttgctttattgactccggtcattaactgtatagagaggacagtgtaggtgctaggattcctaggaagggccaaagggtggccagggttataactgagaaatcagaaccacagaatttacatttccttaccatctctgatttttttgcctaacaggtaactggggtccccatttaatcattgttcccaccagcgtgatgttgaactgggagatggagttgaaacgktggtgccccagctttaaaatcctcacttactatggagcccagaaagagaggaagctcaagcggcaggttcgatgtttcatgtggtcactttcctcccattgatgcctcctttatttttaagccctttcctcaggtgaattcctttctctcttctttcttttttaaaaaaaattttttaattttttgtaaaaataaagatggggtctcactatgttacccaagctgaccttgaacacctgggctcaagagatcctcccacctcaacctcccaaagtactgagactatagctgtgagccaccgcacccaggcccctcctctttctgtcgctccattcttttgctgggactttctcttttcttccaacctgattactgtcctttgaggagtttagcatgtcttccctttgctctcttcttttcatcccactatctgctactttctgtctttgatccctcagggctggaccaagcccaatgcctttcatgtgtgtatcacatcttacaagctggtgctgcaggaccaccaggccttccgtcgcaagaactggcgctatctcattctggatgaggcgcagaacatcaagaacttcaagtcacagcgctggcagtcactcctcaacttcaacaggtggagatggagatggggattcatgggagggttgacttggctagaagggagggctgcctgggttgaggaatgtatcagaatgctcagaaggttgggagcttgctgaccatactctctctgattctctctgtctctttgcagccagagacgcctgctcctgacaggaactcccttgcagaacagcctcatggagctgtggtccttgatgcactttttgatgccccatgtcttccagtctcatcgcgagttcaaggagtggttctctaatcccctaactggcatgattgagggcagccaagagtataatgaaggtctagtcaaacgcctccacaaggtagggcctgcaacagtttgtcagggtattgggaatggtaaggaaccattcctgagcacctgggcagtgcccaggaaacccttggggagagggaagtcagtgccaggctaaactcctttgtcaagctgcagtgttctagtgactaacccattgccagattgagtgacctcatcttagtcatcaattctgttttttttttttttttgagactgagtcttgctttgtcgcccaggctggagtgcagtgttgcaatatccattcactgcaaactccgccttctgggttcacaccattctcctgcctcagcctcccgagtagccaggactacaggcacccgccacaaagcctggctaatttttttttttttttttttgagacagagttcactctgtcgcccaggctggagtgcagtggcgcggtctcggctcactgcaagctttgcctcccaggttcatgccattctcctgcttcagcctcccgagtagctgggactaaaggcgcccaccaccacgccgggctaattttttgtatttttagtagagacggggtttcaccgtattagccaggatggtctccatctcctgacctcatgatccgcctgcctcggcctcccaaagtgctgggattataggcatgagccaccgcgcccggcctacgcccggctaattttttgtatttttagtagagtcggagtttcaccgtgttagccaggatggtctcgatctcctgacctcgtgatctgcctgcctcggcctccgaaaatcctggaattaaaggtgtgagccaccgtgccgggctttttttttttttttttttttttgagacagagtctctctctgtcacccaggctggagtgcagtggcgtgatctggctcattgcaacctccacctcccaggttcaagcgattctcctgcctcagcctcctgagtagctggggttacaggtctgcactaccatgcctagctaatgtttgttatttttagtagaggcggatttcgccatgttggccaggctggtctcgaactcctgaccttaagtgatccgccctgcccccgcttggcctcccaaagtgttgggattacaggcgtgagccaccgttcccagcctgtttgttttttgtttttttttaaatggtgatgtttttgtccttactgtctttgagtagaatggtactgctgattgatccctgcttggatttcttcaacttcatattgttggtgttttctctctctggtcttctttggctcttcctttttcgcccaacttttaaatcacaacatctttcagcattctgatctttactttttttgtcttctcagtctgcatatctcacaggcctactcattcctaaggctttgactatttcttatgtgataaagactctccagtctgtactaaaattccttgactttctagatcacttgacctgtatttaaatttctgatttgctatcattaattgagagttcctcttgaactcaacactgttctaagctagacatctctggccttatagcctgttatttctacttcatcttggtcaatcactatcattcggtaaactaagctagaaaacaggaagtcggccgggcgcggtggctcacgcctgtaatcccagcactttgggaggctgaggcaggcggatcacgaggtcaggacatcaacaccatcctggctaaaatggtgaaaccccgtctctactaaaaatacaaaaaattagccgggcgcggtggcgggtgcctgtagtcccagctactcaggaggctgaggcaggagaatggcatgaacccgggaggcagagcttgcagtgagccaggattgcgccactgcactccagcctgggtgacagagcgcaactttgtatcaaaaaaaaaaaaaaaagaaaacaggaagtcttccttaactattacttttccttcatttatctctgttcctttacttcttccrtgtcactgtagacattgatgactgtgtcctattagattttatcttctgagattacagatttgccttttgttttatctcctgtcaaggccacagtttttattctcctcatcttctagatttatttgcatcatcttgtaaacttaacaattactcctcaaaatctagtttgagttttctattctgcgtagttggtctgcccacagtgcttccttatatcacttcctgtgtcatggtatcattttgtgtctgtctccttcagcagacagcagatcccttgagggcttgcagttgactcatctttgtgtggttggtgtctgatatggtgtgccgtatgactccattagtgtttgctgaggggcttaggctggggctcggtgcctgagttctcctgtttagcctccagcttaatttgcttttaggttttgaggccttttttactgcgccgagttaaggtggatgttgagaagcagatgcccaaaaagtacgagcatgttatccrctgcaggctctccaagcgtcaacgctgtctctatgatgacttcatggcacagaccacgtaagggaggaaggagggtgggccctgggactcgagattggagtgtaggtggctgttaggacgtctcatttatttttcctctttccccagaactaaggagacactagccacaggccatttcatgagcgtcatcaacattttgatgcagctgagaaaagtttgcaatcatccaaatctgttcgaccctcgaccggttacctcccctttcatcaccccaggcatctgcttcagcaccgcctctctggtgctaagggccacggatgtccatcccctccaggtaagtatgattccattaatatgaaatgtaaaggttatcggcattactccaaccatgtacctcttttcgttagactggggkctgacttttgcatcctcatgactcccctatcattcccttagttttattgtactctagccatgtgacttaacgatggttcaacttaatatttttttgacttcactgtgaatttatcaggatgtaaccccatcgtaaattgaggagcatctggacttagaatgattcagcttacaattttttactttttgatgggcttatcaagggtattaaagggtattaaattctttacttgctgagggtttgttggaatgtaacctcattgtaagtccaggagcgtctgcatcacattttgtttatccacttatctgtcagtgggcacttggattctttccaccttttgtctcttgtgaataaggctatgaacataggtgtacaaatatctctgctttttattttgggtatttacttaacagtgaaattgctgtaacatggtaattctatttctgcatgttgggaaaacctccactgttttccatagtagctgcatgttttacatttccaccctagcagggcacaagtgttctaatttctccacatccttgccattacctgttatttctttttttttaattacacccatattaatgagtgtgaattggtatttcattgtggttttggtttgcatttccttatttccttagtgatgagtgctgtcaaggatcttttcatgtgctcattggccacttgtctatatttttgaagaaatgtcttttgaagatttgttaattttgggtgtttgtgtggtggttgttgagctgtaggacttcattatatgctttggaaattaacccattatcagatgtatgacttgcaaatattttgtcacattccataagttgccttttcgctatgttgatagtgttttttgatgcacaaacacttgtttttggtggttttttttttcgagacaaggtctatctctgtcacccaggctagagttcagtggtatgatcatagcttactgcagccttgaactcctgggctcaaatagtcctcccgcctcagccttccaactagctgggaccacgggtatgcgctaccaagcctggctttttttttttttttttttttttgaggcggagtctcgctctgtcctcaggctggagtgcagtggtgccatcttggcttactgcaacctccgcctcccaagttcaagcaattttccacagcctcccgagtagctggggatacaggcacgcaccaccacacccagctaacttttgtgtttttagtagagatggggtttcaccatgtttgccaggatggtcttcatctcttgaccttgtgatctgcccaccttggcctcccaaagtgctgggattacagatgtgagccactgcacccggccctgctgatttttttttttttttttagttttctggaagagatggtgtcttgccatgtcgctcaggctggtttcaaactcctggacgagtagctggaactatatgcgtgcaccactatgcctgactgatttttttattttaatttttttgtagagatgggatgttgatatgttgcctagactagtcttgaactcctggcctcaagtgatccttccgccttggcctcccaaagccctgggattataggcgtgagctaccacacctagttttaatttttttttgggtggggggggcagagttctgctcttgttgcccaggctagagtgcaatggcacaatctcagctcattgcaacctctgcctcccgggttcaagtgattctcctgcctcagcctcccgagtagctgggattacgggcatgcgccaccacgcccagctaatttttgtatttttagtagagatggggtttcgccatgttggccaggctggtcttgaaatcctgacctcaggtgatctgtccacctcggcctcccaaagtgctgggattacaggtgtgagccactgtgcctggcttttttttttttttttaagatggagtcttactctgtcgctcaggctggagtgcagtggtgcgatgtcagctcactgtaacctccacctcctgggttcaagtgattctcctgcctcactcccaagtaactgggactacaggtgtgtgccaccactcccagctaatttttgtatttttagtagagatgaggtttcaccacgttgcccagctggtctcgaacgcctgacctcagataatctgcctgccttggcctcctaatgtgctgggattacaggtgtgagccactgcacctggcccccagttttaaattttgatgtagttcaatttatcaatttttttcttttgttggctgtgcttttggcatcatgtccaataaatcattgtaaaattggcatctttgacactgcattgtgttgttattactacttttttttttttttgatacagagtcttactctgtcacccaggctggagtacaatggtgcagtctcagcgcattgcaacctctgcgtcttgggttcaagcgattctcgattcttgtgcctcagcttcctgagcagctgggactacaggtgtgcacaaccatgctggttgtatttttagtagagatggggtttcaccatgttggccaggctggtctcgaactcctggcctcaagtgatctgcccaccttggcctcccaaggtagtaggattacaggcataagccatggtgccccgcctattatttatttatttatttattttttttattttttttttgagatggagtctcactctgtcacccaggctggagtgcagtggcacgatcttggctcactgcaagctccgcccctccaggtttaagcaattctccatctcagcctcctgagtagctgggattacaggcacgtgccaccacgcctggctaatgttttgtatttttagtagagatggggtttcaccatcttggccaggctggtcttgaactcctgacctcgtgatccacccgcctcggcctccagaagtgctgggattacaggcgtgagccaccgcacccggcctttttttttttaattttgaggcagggtcttgttctgtggcccaggctggggtgcattggcatgatcatagctgactgcagcctcagctccctgggctcaagcagtcctcccgcctgagcctcctgagtagctgggactacaggtacatgctaacatgcctggctaatttttgtattttctgtagagacggggtcttactatgttgcctagggtgatctcaaattcctggggtcacacagttccccaatcttggcctcccagagagctgggattacaggtttgagccaccgtgcctagccttttattttggagtaagggtgtacatgtgcaggtttcttaaatggggtatattgcatgatgctgaggtttggcgtacgattgatcctgttactcaggttgtgagcatggtactcaactggtagtttttcagccccttccccgccacagtcgtttctggcgtatattgttctcatcttcatgtccatgcgtacccaatgtttagctcccacttgtgagtgagtacatgtggtatttggttttctgtttctgtgttaattcacttaaggataatggcctccagctacatctgcgttgcaaaggatgtgattttgttcttctttatgactgtgctttctttcttgtggcagcggatagacatgggtcgatttgaccttattggcctggaaggtcgtgtctctcgatatgaggcagacacatttctgccccggcaccgcctctctcgccgggtactgttagaagtggctactgctcctgaccccccaccccggcccaagccagtcaagatgaaggtcaacaggtacaaggactaaggaatgaggggatggttcctagaataagtggctgaaagctgcccagaggggcctggggtgggaagaaaagagttggatgcaaggctggaatatttatatgggatgggtgcaaacgtggagggaatcagggagagaataactagaagagggtactgggatgggcttctgtgttagtcactttttctccctttctctctgttcggtgctttctgattgtcttaaattcctattccttgttctcctttgggtctctttccttttctttgcttttataatctgtctctctgtttcattttcttcttttctttgatattgctaccccttattctccttctgtccctacccactctcttaattttttctcacaggatgctgcagccagtacctaagcaagaaggccggacagtggtggtggtgaacaacccacgggcgcccctgggccctgtcccagttcgacctcctccaggtcctgagctctcagcccagcccacccctggcccagtcccccaagtgctgccagcatcactgatggtttcagcctcacctgccgggcccccgcttattcctgcatctcggcctcctggccctgtcctcttgcctccactgcagcccaacagtggttctctcccccagggtgagttgaaagggagccaaggatgatgcgtggtgcttcagaaaggttgttcagactgaggaggaagtagtgaaattaaagggtttgaggagctgggctggggacasgggtctagtatttgatgggttggaagggagtatggaggcttctggcaccaggctaaggctttagtcagggtatatctgacaggtgtttgctttgtgtctgcagtgttgccatcccccctgggggtcctgagtgggacctcacggcctcccacgccaaccttgtccctaaagccaacaccacctgccccagttcgcctgagcccagccccacctccaggctcctctagcctgttgaagcccctgacagtgccaccaggctacaccttccctcctgctgctgccaccaccacttctaccaccacggcaactgctaccaccacagcagtgccagctccgactcctgcaccacagcgcctcattctatctcccgatatgcaggctcgcctgccctgtaagttcccagggctctgtggtgagggacttgagatgggaggaaagctcaggaccatgagagcatcaaattttaggcagctgggtcaggcatgatggctcatgcctataatcccggtgctttgggaggccaaggtgggaggtttgcttcagccaggagtttggagctgcagtgagccatggttacgccactgcaatcatgagcaagaccctgtgtcaaaaaaaattgaggcagctaacatatgttaggcattatgccagacattgtcagatcataattaagagcccttaagaaattgacatagggagatgacacatagatgaataaatagtggtaagcctagcagtagaaaagtattggggtaaaaggacagtgtagagcagatggtggtgattagctcagtctggtggcaggccatgttagaggatataaaagagattgctaagcaaatgggattggaaggagtagcacatgaaaagctcaaaggctgtaggtggaggctgagtttattgggacatggtaaattgtgggaagggcttagttgtttgaactggacactcgggggagaggtgtgcttcatggggtctgtgaagtggtgttgagcaggatgakccttgtgtacaataaggccttctctgtttttagcaggcgaagtggtcagcatcgggcagttagcctcactggcacaacgtccagtggctaatgcagggggaagcaaacctctcaccttccaaatccagggcaacaagctgactttgactggtgcccaggtgcgccagcttgctgtggggcagccccgcccrctgcaaagtaggtaaaacccaccccctgtcctgcctttttcctcctcttccctgtctctttgtttttgtgacttttttgaatgtcagcctttatgtttcttacccaagcttttggtgggtggggccaacgggcatggttggagggatcttggataaagatagggaagaggtcattctagagaatgtattccctctctgttcttttcttctcttcttgccttgcctctgccctcctcaggctgatagctgcttctctctctctttctctcttcccttaacccagggaatgtggtgcacctcgtgtcagcaggggggcagcaccatctcatcagccagcctgcccatgtggccctcatccaggccgtggccccgacccctggccctacccctgtctctgtgctgccttcttcgacccccagcaccacccctgcccctactggcctcagccttccgcttgctgctaaccagggtgaggctcctggccttcctacttagcccttgctggccttggtccttccaggcatgcgctgggctactgtctgtccagccttccctcagtgttgttttcccttgcgaatatctatgatacctgtctgccaccttctcctgcccctggacttcttccattctttgggtcttttgtttcttttctaccttcctctcagtgtagcttcctcttgcagtgccaccaaccatggtgaataatacaggcgtggtgaagattgtagtgagacaagcccctcgggatggactgactcctgttcctccattggccccagcaccccggcctccgagctctgggcttccagctgtgttgaatccacgccccacgttaacccctggccggctacccacacctactctgggtactgctcgagcccccatgcccacacccactctggtgaggcctcttctcaagctggtccacagtccttcacctgaagtcagtggtgagtccaggtggctgaggccagaaatccttgccaggaatggagacgagatggggtcgcctcaaggtttcttagttttagtacaggttttttcatatcagcgtactgccttgatttgtagtgggccccagaactgggctgcctgagccctgacctaatttcaagatctatttgctggaatcttggaggggaagaaaatctaaagttgtcagattacttggatgtttgacttcatgttgtgggagtgaatgccttctgggaaatgggaagcttgggggtatgggaaagatgggacagggagtagaaaggctcaggaaaagaattctggggctaactcatcctctctctccacagcttcagcccccggagctgcccccttgaccatctcttctcctctccacgtgccatcctcmctccctgggccagcctcttctccaatgccaattcccaactcctctccccttgctagtcctgtgtcctctacagtctcagttccattgtcatcttcactccccatctctgtccccaccacacttcctgccccagcctcggctccactcaccatccccatctcagcccccttgactgtttctgcttcgggcccagctctgttgaccagtgtgactccaccattggcacctgttgtcccagcggctcctggacctccctccttggcaccatctggtgcttccccgtcagcatcagccttgactctaggtttggccacagctccatccctgtcttcatctcagacacctggtcaccctctgttgttggctcccacctcttcacatgttccagggttgaactcaaccgtggccccagcatgctcacctgtcctggtgccagcttcggctctggccagtccttttccgtcagcaccaaatccagctccagctcaggcttcccttctggctccagcatcttctgcatctcaggctctagccacccctctggctcctatggcggctccacagacagcaattctggctccttctccagctcctcctctggctcctcttccggtcctggcaccatcgccaggtgctgctcctgtcctggcttcatcacagactcyggttccagttatggctccatcgtctactccaggaacctctttagcctcagcttcaccggtaccagctccaacccctgtgttggctccatcatcaactcaaactatgctaccagccccggttccgtcacctctcccgagcccggcttctacgcagacactggccctagccccagctttagcacccactcttggaggctcatctccatctcagacactctctttgggaacggggaacccccagggaccctttccaactcagacattgtcattaactccagcatcatccctggtaccaactccagcccagacactgtctttggcaccaggaccaccactgggtccaactcagacgctgtctctggctccagcaccccctctggctccagcttctccagtgggcccagccccagctcacacgctgactttggctccagcatcgtcatctgcttcactcctggccccagcttcagtgcagacactgaccttgagccctgccccagttcctaccctgggcccggccgcagctcagaccttggcgctggccccagcctccacacagtccccagcttcccaggcatcttcccttgtggtttcggcatctggtgccgctcccttgcctgtcaccatggtatcccggctgcctgtttccaaggatgagcctgacacactgacattgcgctctggtccccccagccctccctccactgctacctcgtttggtggcccccggcctcgacgccagccccccccaccacctcgttcccctttttatctggtaagttttacttcctcaagagggaacaggaagttgagtttctttggagtgttggtagggtggatggaacagtgatgtcacatttaacctggtgaattacaaagcttaatgttatggaccaagtacttgagtgacatttggacaagtcccttctcttccctgggcgtgtacctcatgatccgcctgcctcagcctcctgaagtgttaggattacaggggtgagccaccacgcccggcctcttttcccgttttttaacccgcacggtaataaatgggcagtaaaaggaactcttctctgtcccttttatgatttccggtagctgtttctttcctgtactatgtatataggcccatgtctgtgtagtacttgagttaaactcacagttcagcttaagtaaaccagaactaaggagaaggaaggtccagtgggtccctccacgccctctggcttttccccactgtaatcagagctgctgcttagtctttgcttcatgcctactcccccaccttccaccagtgccattgactccacctttggtttttacctgaccagccgctaggttggtcctggctggttggaagtagagagtagagggattgctctgcaagtagataatagcctcttgccacttggttttttttggtaacagtttgtgctataaatcatataccattcgatttacccatttaaactgtacaatagtttttggttttttttttaaatacagatgggggtctcccactcttgaccaggctggtctcgaattcctggcctcaagtgatcctcccatctcggcctcccaaaatgctgggattataggtgtgagccaccatgcctggccctaaactgtacaataggtttttaatatatttatagggttgtacaatcatcaacacaatcaacttagaacctttccgtggccccaaaaagaaacgctgcacctgttagccagcattccccaatccctccgtccctcctagtcttgaatgactaccatcctacttttttatttctctagttttgcctatggagtcataatgtataatgtgtggtccattgtgactggcatcttctacttagattaatgttctttgaattttattgtgttatagcgtatatcagtacttcatttgtttttatgttgaataataatgtatgaataccacattttatccttgagttgatggaaacgtgtgttacttctgctttatggttgttatgaacaatgctgctgtgaacatttcatgtacaagtttttgtatggacaggtgttctcagtttctgttagatacatactgaggagaagaattgctgggttatattgtaactaggttttaactgtttaaggaactgccagacttttccaaagtggctgcagcatttgacattaccaccagcagtctgtgaggattccagtttctccacatttgagccaatacttttttttttttttttgagaaggagtcttgctctgttacccaggctggagtgctttggcacggtcttggctcactgcaacctctgtctcctgggtttaagtgaccccacctcaacctccctcgtagctgggattacaggcatgtggcaccatgcctacctaatttttttgtattcttattattttattttatttttgagacagaatcttgctctgttgcccaggctggagtaaagtggcaccatcccggctcactgcaacctccacttcccaggctcaaacgattttcctgtgtcatcttcccgagtggctgggactacaggcatggcgtcaccacgcctggctaatttttttatttttagtagagatggggtttcaccatgttggccgggctggtctcgaactcctgacctcaggtgatccgcctgccttggcctcccaaagtgctgggattatagacatgagccactgcacctggccagatttttttgtatttttagtagagatggggtttaccatgtttgccacgctggtttcgaattccacacctcaagtgatctgcccgcctcagcctcccaaagtgctaggattacaggtgtgagccaccatgcctggcacatcatcactttgattatagccatcctgctgggtgtgaagtagtagttcattgtgattttgatttgaatttccctgttggctaatgttgagctttatttcatgtggttgaaataccatgctggccatttgtgtatctttgaagaactatctgttcagatcctctgcccttttaaaatgggttgtctttttattattgagttgtaagagttctttatatattctgattacagatcctttttcagacgtatggtttacaaatagtcttttttttgagacagtgtctcactttgtcaatcaggctagagtgcagtggcacagtctccgctcattgcagcctcctgggcttaagtgaacctcccatctcagccctccgagtagctgggactgtaggcttgtgccaccatgccaggctacttgtttgtttctttttttgagatggagactcactctgtcaccaggctgcagtgcagtggtgcgatctcagctcactgcaacctccgcctcccaggttcaagcgattctcctgctcagcctcccaagtagctgggactacaggcttgcaccaccacgcccagctaacttttttgtaattttagtagagatagggtttcatcatgttggccaggatggtcttgatatcttgagctcatgatctgcccgcctcggcctcccaaagtgctgggattacaggtgtgagccaccgcgcctggcccttgtttgtattttttgtagagatgcggttttgccatgttgcccaaactggtcttgaataggaggctcaaaccatccacctaggcctcccaaagtgctgggattataggcttgagccactgctcctggccagattttctctttttgctactattgggagctagcctcaaaaggaactagctctttgagtttattggtttttccgtctgctaggacaccttttttccctcacatagagcacttcaagccaagaggtgaaacttggtagcagtcaggaaggagatttggaacactcctcttttcacaactatctcttggggtctagtctccctcatttgttcattttgttaacagataaatgtattgagagcttaattgtgctagttactgagtgattatagtgagcaaggcacagttcatgttgtatggggcctaccgtgtagtggatagatattagttaaataatcatacagatgtgtaactacaagcataataagtgatacaaagaagtttttcagactgtgaaactggaagcacaaagatgggaaaggattgggtcaaagtcatccaggtgtcctcactgccgggttgcccattttctgtctcagagtgatgagactcggatgtccggttagctgttcccattccaccccattccagtctggcccttggcaaaaacctggtctggatttgattggcgcctctgtatcctggtcagtgatttgaagaaggctatagtcctggagtygagtgttacgtaggaaaatacccacaaatcgtccattctataaacttgttggaattgtagatcttaattttgaatattcagtcattctgctttggtagcatacaaggaaagatcagttttctctaggagagaagttacttaacataacttctgagaaagaatagttatttaacataaaaaagaaagttatttaacataacttctgagaaagaatagttctcantgataacttggaaaactacaaaaagcatagtgtatttttggatcccatggtttctatatatttatttccatctgggaagaacagtcaggttttgatgtggactctgagggtgctgattacttcctctttttctctcacccccaggactccctggaggaaaagcggaagcggcagcggtctgaacgcctggaacggattttccaacttagtgaggctcatggggccctggcacctgtgtatgggactgaagtcctggatttctgtaccctgccccaacctgttgccagccccatcggccctcgttctcctggccccagccaccccaccttttggacttataccgaggctgcccaccgggctgtactgtttccccagcagcgactagaccagctgtcagaaatcattgagaggttggcagggctaagtgctaatggggagtgggtcttggggcctcagagtggatgtagtgcttagggctggtgaaggtgttaacttctggggcatttcagagtcccatcttttacactgcctgcttcttcctttcacaggttcatctttgtcatgcctcctgtggaggcacctcccccttccctgcatgcctgccacccacctccttggctggccccacgtcaggcagccttccaggagcaattggcctctgagctctggccccgggctcgtcctttgcaccgtattgtgtgtaacatgcgcacccagttccctgacttaagactcatccagtatgattgcggtgagtttgttggccagtgtaggacccttgacttctcttcttttcttagtattaagactgttgtatcagagggatgctgcacttaagttctcttgcgatttctgtaaagctttagatggttttttaggttatgcttatgggcaagatagagaaatgtaagccttgttagattcttgacattcataaatatgactttcttctttttttttattttgagacaaagtctcgctcagtcgcccaggctggagtgcagtgcagtggtgcagtctcagctcactgcagcctcccaggttcaagtggttgtcccacctcagcctccagaatagctgtgattacagacatacgccaccatgcctggctaatttttgtatttttagtagagatgggatttcgccatgttggccaggttggtctcgaactactgacctcaagcgatcctcccgcctcagcctccaaagtgctgggatcacaggcatgagccaccatgcccggccatgaatttgactttcatgaaagttgaaaatgtgctgctaactccttcattcagtgatcattttgtgaacatgttacattttgctaatcatttgggatacaatagcaagtaagacagtgcagcatagagtttttatttagctgtatgggaaaagatgtctggtggtacaagactgcacagtaagtaaacagtaaattttggtcttggaaaagacaaggacctttttgtgttgactagaattatttggcggtaacagaaaaccaactaacagtcgcttaaaccacaagagcatttattgttttcttaatgagccaatctgagaatagtggtgtgtagctgtttcagtagcttaacgatattttcagggaccaggaccttttcttccttctttctttctttttttttcagatagagtctcactctgtcgcccaggctggagtgcagtggctcgatctcggctcactgcaacttccgcctcctgggttcaagcgattctcctgcttcagcctcctgagtagctgggattacaggtgcacaccaccacacccggctaatttttgtatttttagtagacacggggtttcaccatgttggtcaggctggtctcgatctcctgacctcgtgatctgcccaccttggcctcccaaagtgctgggattacaggtgtgaaccactgcgcccagccttttttttttttttgagatggagtttcgctgtgtttcaaggtattctcctgcctcagcctcccgagtagctgggattacaggtgcccaccacaacgcctgggtgatttttttgtatttttagtagagacagggtttcaccatgttggccaggctggtctcgaactcctgacctcgtgatccccttgcctcggccttccaaagtgctgggattacacgcgtgagccattgcacccagccttaagggaccaggactttatctttctaccctgctgtaccatctttagctttttatctttttattctcatgcttttgtttcttcatgatgttaggatggctgccataactccagggtatacaccaatcctctaaacaagaaacaaggggttgagacaaaacactctgagaaggttttctgggaacaaaagacctccaagctgactttgcttcataactcattggctcaaactgagctatatgcccatacttagagcaatcactgacaaaggggaatagcaaaaaagacctctggcttatttagatcaacttgatttattttctgggtttgggttggggccttcttcacctgggagcaaagaacctctgccagctgtccagggttaatcaggttcttttacccaagaatggctattgggtaagtgactagttccacagccctgcacagacatttgtatagtaacatgtttcgagattttttaaatttcctagaatataagaaaatcaaaatttttattaatatgtgttcaataaatgttttagtaaaaaaaagtgtttttgttacatttgaaactattcagagtagatgaactgaaagtcttggttaaaagtgttcaaggccgggtgtggtgactcatacttgtaatcccagcacttgggtaggctgaggtgggcagctcacttgaggcaagtaaagaccagcccaggcaacatggcgaaaccctgtctcctcaaaaactgaaaaattagtggatatagtggtgcacacctatagtcccagctactcagatggctggattgcaggagcctgggaggttgaggtgcagtcagctgtgatcatgccactgcactctagcctgggtgacagggtgagaccttgtctcaaaaataaaataaggctgggcctggtggctcatgtctgtaatcccagcactttgagaggctgaggtgagtggatcacttgagttcatgagttggagaccagcctgggcaacatggcgaaaccctgtctctacaaaaaatacaaaaattagccaggcgtggtgacatacgcctgtagtccaaactacttgggaggctgaggtgggaggatggcttgagcccgggaggcagaggttgcagtgagctgagatcgcaccactgcactccagcctgggtaatagagccagaccttgtctcaaaaaatgaaataataaagtgttcaggctgggcacggtggctcacgcctgtaatcccagcactttgggaggctgaggcaggtggatcacctgaggtctggatttggagaccagcctgaccaacatggagaaaccctgtctctactaaaaatacaaaattatccggacgtggtggcacatgcctgtaatcccagccactcgggaagctgaggcaggaaaattgcttgaatccaggaggtggaggttgccgtgagctgagattccaccattgcactccagcctgggcaacaagagcaaaactctgtctcaaaaaaaaaaaaaggaaaaggaaaaaaataaaagttcaaactgtgttaccagaaatgttgaagttatttctgtgtttgatggaaggttgaactagataaactttctaagagcctttactgttctgatctgtgaccttaaatccctgtctgtaagctgtgaccatggatttgttgatatctatcctgtgaatctgttctggatttcaggtggtatgactattgtaatacttaaggatctcttgctcataaagcattggggattctgtttttccctcgatgttatgtattcccctactcttttagactccaagaagttagattctaggctggagcagaccgaagaggtgaagcccttaaaggaagaacttgtatggagttaaacgtagatagatattttttgtgacagggtctcgctttgttgcccaggctgaagtgcattggtgggatctcagctcactgcaacctctgcctcctgggttcaagcccgagttctcatgcctcagcctcctgagtagctgggattacagtcacccgccatcacgcccagctaatttttgtgtttttagtagagacagggtctcatcatgttggccaggctggtcttgaactcccgacttaaagtgatccacctgcctcagcttctcagagtgcagggactacaggtgtgagccaccatgccctgccgtagttaaacatttttgatctgctaggctaattgaaactttggcttaaagcattgattatctttcaaccccagccttgcattgctaagcattctacccattgcggcttgtagctagctccctgtatcccttcatatctctttaggaaagttgcagacgttggcagtgctgttgcggcagctcaaggcagagggccaccgagtgctcatcttcacccagatgacccgaatgctggatgtattggagcagtttctcacctaccatggccatctctacctgcgcctggatggatctactagagttgaacagagacaggtaacccaggtttctgcagctcttagaggctcacctccgcttctctctccttttcycaggatttgggcttccagacggggtgccactaagcctttagacctgttttgggggataagtctcccagtatcatctttttttccctttccttctaggccttgatggaacggttcaatgcagacaaacgcatattctgcttcatcctttcaactcggagtgggggtgtgggcgtgaacctgacaggagcagacactgttgttttttatgacagcgactggaatcccaccatggatgctcaggcccaggaccgctgtcaccgaattggccagacccgggatgtccacatatataggtattgcctagtcttccctcaccttactttccgtttactgatggggtttcctggatatatttggctgcttacacacggccttcatcamcccctaggcttatcagtgaacggacagtggaggagaacatcctaaaaaaggcaaatcagaagagaatgttgggggacatggccattgagggaggcaacttcaccacagcctatttcaaacaggtactaagtaagatcttttagcctatgcaggagaaaactgctgcgccttcaggagttcctcctgtttattaaagaagactgctttggactttgggaggctgaggcaggcggatcacttgaggccaggagttggagaccaggctggccaacatgatgaaaccctgtctctactaaaaatacaaaaattagccgggcatggtggtgggygcctgtaatcccagctgcttggaaggctgaggcaggagaatcacttgaacctaagaggcggaggttgcagtgagttgagatggcgccattgcactttagcctgggtgacgagcaaaaccgtctcaaaaaagaaaaaacaaaaaggactgctttggccttcacagacgtgcgtcttcaaccagtrgtacccctgacagttccaagaaccatcagccttacagcttagacctaagactagcattctgttgactctgacacttccctctgttctatccgatagcagaccatccgagagctgtttgatatgcccctggaggaaccttctagctcatccgtgccctctgcccctgaagaggaggaagagactgtggccagcaagcagactcatattctggagcaggtaaaaaaagagtgggcagttcgtaaagttgagctgattyttacagaatatcttgtcttttgttagtctgttgagcttgtccaggggaaagagatgtttcttctgcttcccagattacagtcagcctttgatagttgtaagcacattgcttattggttcacatgattaagtaggaaaaaaaaacaggattttggagtctttagttttaggtttgaattccagtaatgcttcttaattgtgttaagacaagttacaatcgtcactcttctgaacctcactttctattaaaagtaatgtgggcagggcatggtgggtagctcatgcctgtaatcccagcactttgggaggctgaggctcccagctggagagctctgaaaacacacaaatgctcagacccaacaccccaaaattatgatagattttgagacagggtcaaggaataaatcttttaagaacctttccaaatgtgattttattatgtgtaagtatttgaaacagcgtttcacattaagtacaaagcattttttttttttttttttttttttttttgagacggagtctcgctctgtcgcccaggctggagtgcagtggcgggatctcggctcactgcaagctccgcctcccgggttcacgccattctcctgcctcagcctcccaagtagctgggactacaggcgcccgccactacgcccggctaattttttgtatttttagtaaagacagggtttcaccgttttaaccgggatggtctcgatctcctgacctcgtgatccgcccgcctcggcctcccaaagtgctgggattacaggcgtgagccaccgcgcccggccacaaagcatttcttatatccacctcaccatctaatcctcaaaattatttccttttcattagtatttccacttaagagaagtgtttaagttggtgcaaaaataattgcagtttttgacattacttttttttttttttttttttttttggagacggagtcacggagtcttgctctttcgcccaggctagagtgcagtggcgcgatctcggctcactacagcctccacctcccgggttcaagtgattctcctgcctcagcctcctgtgtagctgggattacaggcgcgtgccaccacgctcagctaatttttgtatttttagcagagatggggtttcaccatgttggtcaggctggtctcgaactcctgacctcatgatctgcccgccttggcctcccaaagtgctgcaattataggattgagccactgtgcccgggtgaattgtgcatttttattcacatctttctgtggtggcttttttttttttttgagagctgaggctgactttaaaggaagggaagtacagcgagcaatctcaaaaatactcatttttccctagtgggagtcctggtaaaatccattccatcctttgtggaccactgagttgttgtggtaactctggaggcctaggaggttgttgagttctgttgcaaacctagtttggtgtacgcttggtctcaagttcttgcctgaatcaaatcacaggatgtaaagtacttgaagtctcatgttttctttttcttttatacaccctggtaggcattgtgtcgggcagaagatgaagaggatatccgtgcagccacccaggccaaggctgaacaggtggctgagcttgcagaatttaatgagaacgatgggtttcctgctggtgagggagaggaagctggccggcctggggctgaggatgaggagatgtcccgggctgagcaggaaattgctgccctcgtagaacaggtcagtgctggacccactagttcttgactttactgcttcccctgggcttgtgaccctccttttgtcttccctggtgggaataaataagggtggtggggccctgggtaccaggttcctaagtttatcaccaccgctcctccttgcagctgacccccattgagcgctatgccatgaaattcctggaggcctcactggaggaggtgagccgagaggagctcaaacaggcagaagtgagtatttccaggggtggggctggcagttggaagctgctaatttctttttcttttctcttttttttgagacagtctcgctctgtcgcccaggctggagtgcagtggcacaatctcgggtcactgcagtctccgcctcccgggttcaagcagttctcctgcatcagcctcccgagaagctgggattacaggcgtgcaccaccacgcccggctmatttttgtatttttagtagagacgggggtttcaccatgttggccaggctggtcttgaactcctgacctcaggtgacctgctggccttaacttccccaagtgctggaattacaggcgtgagccaccgcgcctgacctggaagctsctaatttctactcactctctactctgcttgcctcctcctgaccacttttggaccctgttgttgtaggagcaagtggaagctgcccgcaaagacctggaccaagccaaggaggaggtgttccgcctaccccaagaggaggaggaggggccgggggctggggatgagagttcctgtgggactggtggaggcacccaccggcgcagtaaaaaggccaaagcccctgagaggccggggactcgtgtcagtgagcgtcttcgtggagcccgggctgagactcaaggggcaaaccacactcctgtcatatccgcccatcaaactcgcagcaccaccacaccaccccgctgcagtcctgccagggagcgagttcccaggccagcacctaggcctcgacccactccagcttcagctccggctgcaattcctgcccttgttcctgtcccagtttctgccccagtacccatttcagccccaaatccaataaccattctccctgtccatatcttgccttctcctccccctccttcacagattcctccttgttcttctcctgcctgcacccctcctcctgcctgtacccctccaccagctcatacacckcctccagcccaaacctgtcttgtaactccttcctctcctctcttgcttggtccaccttctgtgcccatctctgcctcagtcactaatctccccttgggcttgaggcctgaggcagagctgtgtgcccaggcattggcatctccagagtccctggagctggcttctgtggccagttcagaaacctcctcactttctcttgtgccccctaaagatctgttgccagttgctgtggagatcctgcctgtgtcagagaagaacctttctctcaccccttctgcacccagcctgaccttggaggctggcagcatccccaatggtcaagagcaggaggcaccagattctgctgaggggaccacccttacagtgctgcctgaaggtgaggagttgcccctgtgtgtgagtgagagcaatggcctggagctcccaccctcagcagcatctgatgagccacttcaggagccactggaggctgacaggacctcggaagagctgacagaggccaagaccccaacctccagcccagagaagccacaggaactcgttacagctgaggttgcagctccatccacctcatcttcagccacttcctcgcctgagggtccttcacctgcccgacctcctcggcgtcgcaccagtgctgatgtggaaattaggggtcaagggactggtcggccaggacaaccaccaggccccaaagtgcttcgaaagctgccaggacggctggtaactgtggtagaggaaaaggaactggtgcggcggcggcggcagcagcggggagctgccagcaccctagtgcctggggtctctgagactagtgccagcccgggaagcccgtctgtccgcagcatgtcagggccagaatcctcccctcccattggtgggccctgtgaagctgctccttcatcctcactgcccactccaccccagcagcccttcattgctcgccgtcacattgagctgggggtgactggtggtggcagccccgagaatggagacggagcactgctcgccatcaccccacctgctgtgaaacgtcggagggggaggccccccaagaagaacaggtctccagcagatgctgggagaggtgtggatgaggcaccctcatccaccttgaagggaaaaaccaatggggctgacccagtccctgggcctgagaccctrattgttgcagatcctgtcctggaaccacagcttattcctgggccccagcctcttggaccccagccagttcacagacccaatcccctcctgtcacctgtggagaaaagaaggcgaggacgaccccctaaagcacgagatttgcccatccctgggaccatttcctctgcaggggatggcaactccgaaagtcggacacagccacccccacacccatcacccctaaccccactcccaccactgctagtttgtcccactgctactgttgccaacactgtcaccactgtcaccatttcaacgtccccacccaaacggaagaggggccgacctcccaagaatcctccatcacctcggcccagccagctccccgtcttggaccgtgacagcacttctgttctcgagagctgtggattggggaggcgacggcaaccccagggccaaggggagagtgagggtagttcctctgatgaggatggaagccgccccctcacccgcctggcccgccttcggcttgaagcagaaggaatgcgaggacggaagagtggagggtccatggtggtggctgtaattcaggatgacctggacttagcagatagcgggccaggcgggttggaattgacaccacctgtggtctcactaaccccaaaactgcgctcgacccggctgcgtccagggtctctagtccccccactagagactgagaagttgcctcgcaaacgagcaggggccccagttggtgggagtcctgggctggcaaagcggggccgcctacagcccccaagtcccctggggcctgagggttcagtagaggagtctgaggctgaagcctcaggtgaggaggaggaaggggatgggaccccacgccgacgtcctggcccccgccggcttgttgggaccaccaaccaaggggaccagcgcatcctgcgcagcagcgcccctccctccctggctggccctgctgttagtcacagaggccgcaaggccaagacgtgagtgggctgcccctccacctaggctttccaccgtggccactccctccatgaccaggcctgactctgttaaccactacttgaagtcttgagggggaaagcctccagggagacataggggccttctcccttcttcccaccaaagtagggggtaggcaactggttgtcatggaaatggggatcatcacagtccccttccccttcaccccacgtggctgggcagtgttaagggtggcaagatagtctctgtccccacccccttgtacttgattccccagctgtctttcacacagccccccacccttaggggaagggggaggggcttctctacaatgaggtttttttcttttttttttttttttaagaagaaaaaataataaacttagtttctgtatgagcatccgcgtaaggaggcttctgattttctggtctggtggagggttgggtgggaacttgggcatcgtttttctcctccctcttgttcttgcaaagatcctagcacctgatctctagcccaggactatatgttccaggcagaaatctacccaagaagagggaagattggtgaatttgatgtggtagggtgcctttccccagtcagtttgaagtcacagatatccttttcctctcatttcttttccctcggttcctagacgttcctcggagctctttgatgcctcagacctttcccttttatccctcttgctcaggtgcttcctttcacaactttttccagagggcaggcgtcctagctccagttgctccatcccttgggccctcccctgctcttcatctagccaaactggtttgagtcagccacaccccttcccagctccctgggctcttcacgtggtggctggccactcaaccccacccctgggcttggcttggagccctgagtcagctccatcaccacccaagccaaaccaaagctgaggcaggagccgaaactcagagtccttcaaggcctatagccaggtaagagccctgttcatttttacattctctgttcactccctgggccctccttgtgtcctcctgttgactctgtgcttacctcatctgagttatttctttgtatctacttccctgcagcttcttggcacacatcattctttgctctctacttgtctcgcccctttcacctttcctgtccttcgttacttgggttcagggagccaaggtggtttcattttgtctgggttgtaggggaatggttggagataagggtagaaaggtggtttgatgccagggcctagaggacctgagaagtagggagacaagaaatgattaagtagggcatcattttgcaggtttctgtgtggtaatgaggtcatttagactcagtgtactagtctgattgtgttatgtggcctgggttaaattggagagaggaggtggcagggaggcagcatagcagaggaagccctgacttagggaagtaaagtctttctgatgtttggttttagtggtaataaagggcttacttgggtacattttccttacctttctccattcccataactgttttcatgtaaaatggctgctttgcttgaaacgggttgcagtacctagggtcctgctctctgacatctataatactcagggggcagcctcttgggaatttgggggaattgtagagtcctttgaaatacagattaaaataacagattcatagcagctttcaagagtttgtatttttcctccttctcggtgtgcacctgtcatttggcttcttcccacttgttgaaacactaaataatacagataatgccttgtctacactggcttgctttcaaagactcagaacctcaagcttaggtaaaaggattccagccacacatttcctctcctgctctgtgagtcactagaggaattccccagtaaggcaacattcctgagtgccaggctaggccatgagaacagaatgctctgagaggggtggagtctgagcaagcaaggccaagggctctgttgttgggctcacaagtaccttgactatcgcccacaggtgatggaggacgaggagaaggcagtggagatcttgggcaacacggaagctgctcatcctccatcccccatccgctgctgctggctccgcctccgctgcttggcagctactagcattatctgtggctgctcttgcctgggagtcatggctctggtgtttgccatcaaggtgaggagtgcaattcccatgggaatgggggtgggtataaggcaatggtttcatgtatctgatctatctacattgaccagtcactgaatacctatcagtgctctgggcctagtgccagaaataagaataagacagggttccttgtcgtcagaggacccataatctaatgaaagaggtgacagtgaaaatgggtaattaatagaatgcagttcatcagtaccgtaatacaggaagcacaggacagtgtgggagccagggaagatctatgtatgtaattatatatgtgtatatggtagaataggtgactggaaaggcatcctaggagaggtgacaggattaatcttaaagggtgagtgagtaagtgtggaagggcattccagataaaaggagcagtgtgtacaaaggcctgtggagcatgactggaccagtgaggaatagtgagagatgaagctagaggacccagattcccaagggcctccagttctgtgcttaagagttttgactttatcttgaaagtactggggaggcattgaatggctcctgcaggggaaagtgacatggtcagatttgagttttagaaagatccactctcaaggcctacatcgagggtgaattggagggggcaaggctggaggccgctgaacggtgatgagcgcaatctctaggagtctgaaagacacttgggtttttgagagggcttcaccatttcaaaaagcctattagaaacagcacatgtccgccgggcgtggtgacttaggcctgtaatcccagcactttgggaggccgaggtgggcagatcacgaggttaggagatcgagaccatctaggccaacatggtaaaaccccgtctctactaaaaatacaaaaattagctgggcgtgatggtgcgtgcctgtaatcccagctactggggaggctgaggcaggatcattgcttgaaccacggagtcggaggttgcattgagctgagatcatgccactgcactccagcctggtgacaaagcaagactctgtctcaaaaaaaaaaaaaacaaaaaaaaacagcacatgtcctttaggaaaggctacacaggctaacttaaacttcatgctggaatcttctcaaccctagacatattttaacagtcagaaactgtaagaactcctgggttccattagggcaaaatcctaaaaagggcccttaatgataacaaagaggctgggcgcagtggctcacgcctgtaatcccagcactttgggaggccgaggtgggcagatcacttgaggtcaggagttcgagaccagcctgaccaacatggtgaaaccccgtctctactaaaaatacaaaattagctgggcgtggtggcacgtacctgttatcccatctatttgggaggctgagacacgagaattgcttgaacctgggaggaggaggttgcagtgagattgcaccactgcactccagcctgggtgacaggagtgaaactgtctcaaaaaaagaaaaaaaaaagatggaaaagatgaggcccattgggctatgagaatgaggtggtgtttgggcatgagtgaagttactctagcctcactgtttcttgccaatagttacaaattctgaatcaatcttggatagttggaaagaatggggaataacagaattggaaagtactttcccataggcgatcttgtgagctatggccaccctgagaagtaggcagggcccagagatgggtaccttattttgcagatgagaggttagaatcagaaactggaaagggaggtagagggtttggatgtgagattttgatccgtgacagggaagggggagcggagtggggaaatgggcaccttggggcagaagcagggggagaacctaaccaagaacctgcccccacaggcggaagagcggcataaagcaggccggtccgaggaggcagtgcgctggggggcccgggcccggaaactcatcctggccagctttgctgtctggcttgctgtcctcattctgggtcccctgctgctgtggttgctctcctacgccatcgctcaggctgagtgaccctggatggcctctgctgagagccagccgagacctcctggatcctgcaatgcggcattgctaaggtcctgtgacagcagtggttggaaggatcctggttggaaggatggggactctctcaaggggctttggaagagctcttctagccctttataaaaggagggcagcagctgagactgatgagaggagggcagcctgctctgttctttcagggccccccacccccatctcccctaccctagcccaccctagggcctctacccagcgggaggggttgaagaccaggcctggttttattagaattcattttgtaataaaagccttttttagtggtgaaatactcctgtctaattgttctcctcctgctttcccttgggcccttggtgagagccagactggacatctgactgatagcagaagccagcatccacctcatccaggagctccaagagaaggaaacaatttttattttcttcttctggaagtttcccttcttggaaagaccccagcttctcccttgtacgtccacagagactctgaggccaagagtagtagcagctgctactatttattacttactatattccaggctgtgttctaagcactttatatttcttaacttcctccagttttcagtcactcagtaggtgtctgtactatcatatccatcatatgaatatatcacatatgataggtaccaactatctgagtgaaaactggaagaaatgttctaaaatgacagtgttctcgttttatacttgaagaaacaaacagatttgcacaaggtcctcagctactaaatggtagagctgagactgaacccagacagtttggttccagagctgagagaggagtgaaagagttgggtaacagcaacaaccatcctgtacatggagatttgagtgattaaaatggattttcatatcttttatcttggacctcataatatttcaaattttttttaaaattatgaagtatatcatacatataggaaaatacccaaaacaagtatacagttcattaacacaaagcaaacgtgaataaccacattcagtaaagaaattggaacactgtcaacacttcacagcctcctttatactcctcccaatcactgctacttcctttcttcccacaggtaaccaccattctgacttctagcagtgtcatttaattttgtctgcatttgaactttatataaatggaatcatgtattcttttcatgttaacattgtgagattcgtcaatatttggaataggtgtagttttcattgctgtgtagtattcagtcatatgaatgtatcacaatttgtccatttactgttggtggactttgggatgtttgcagtttggggttattatgagtcatgccttttggagtacgtctgtcctggcaagcaccttaccataattcagagtccagaagagcacctaaaggaactggagatgttgcacactgaagagactagaggggaaggagaggcacatgatggctgtcctcagtgttcccaaatgctccaggaagaaggaagagaatagattggtggtctcagaagttagaattgaaacagtgggtagaagataaatatacagggcagtgttctcaacatagcttcacagtggaaccacctgggagctttaaaaagtagttaggcctgggctttatccagactacattctgacttaatcggtgtgaggtacagccttggcatcaggatttctcagtttcccaattaattgtagtacacatagtttgagaactactgctctatagataagattttattgtattccctctgcaatttctaaatcaggaaaaaagggtaacacattttagaaagtgtttttgtttttttgtttgtttgttttgagaaggagtctcgctctgttgcccaggctggagtgcagtggcacaatctctgctcactgcaagctctgcctcctgggttcacaccattctcctgtctcagcctcccaagtagttgggactacaggcgcccgccaccatgcccggctaattttttgtatttttagtagacgggatttcaccgtgttagccaggatggtcttgatctcctgacctcgtgatccgcccacctcggcctcccaaagtgctgggattacaggcatgagccactgcaccgggcctgttctttgtttttttttttttttaactcttaagttctgggatgcaagcagaacatgcaggttcgctacgtaggtatacatgtgccatggtggtttgcttcacccatcaacctgtcatctaggttttaagccaccatgccctgctaattttcgtatttttagtatagacggggtttcaccatgttggccaggatggtctcgatctcttgacctcgtggtccacccgcctcggcctcccaaagtgctgggattacaggtgtgatccaccgcgcccggcccaacgcatagatcttaagtgtgcagcttgattattattatttttttttgagatggagtctcgctctgtcacccaggctgaagtgcagtggtgtgatctcactgcaacctctgccttctgggttcaagtgattctcctgcctcagcctcctgagtagctaggattacaggcgtgtgccaccacgcccggctaatttttgtatttttagtagaaatgggatttcaccatttggtcaggctggtctcgacctgaccttgtgatccacccacctcagcctcccaaagtgctggtattacacgcgtgagttaaccgtgcctagccgacgaatgttttaacgtaaataaacctgtgtagtcagtcactcaccacctataggaatataacatttgcagcacatcagcaagttccctcatgctcttcattattatttttatccccgatattgacctatggaaaccctttcaatctggttcctgtgtccttgtgataagccccgctcattagtaatgtctggcacaaatcactccagactcaccttgtactttccctgctgaagcctagaaattggccatttctcctgaaaagacttagttccttttattgggtactgttattgagaaatcagcatctagacactaggcgttctactgggaagttactgcttagggcattctgaaagcagaggtaagagccagtaaatagttaatgttatctactttacatcttttaaaaatctttttaaaaattccagtcaatcatagggttctttctccactttccccattccagattccagattcccacagttaagaaccttggcttccagtcacatcaatatattgattactcagcttcagaattattatcctgttatattaccaaacaacaaatctaagtaaagttcaagattttttgcaattttgcctttagattgatggtatagagtcatagtactctataaaaagttacctgaattcatttttcttccctcataattgtaatcccaaagtgtcatttctaagatagctgtagggagataagttaattcttttcctctttggctggaacataacctccacagggtaggggtgtgtgtgttgtttcattgctctcagtctagttcctaggtcttagacggtcataaaaatttgttagtgaatgccaggtttgagctatgcactgagtcactcctggcagaatctaacaacctggtgggtttagaacagagtgtgatacaaggcttttgggagagggtggaagattgagaaagtgtgtaaatcccagatagtaaacgctagggctttggatgtatttaggaggagttgaagcggacacagaaaaggcttcctctggcattttaagtccgaactaagaggccaagctggagtccaagctgcgtgtgtccaaatgttttaagggctggagtgtactcaggacaggcgctttgggccaggctgctaatattgaaaagagcttgctgggcgttgtggctcaagcctgtaatcccagcattttgggaggctgaggcgggaggatcgcttgagccccgaagttcaaggctgcagtgagctatgatcgcgccactacactgcagcctcagcgtgggctacagagcgagaccctgtctgaaaaaagagaaaatgctgaattcagttagggatgcttggaggagaccgagggaaccctgctcaagtctgggaactagaggcgcgggaaggtcctgcttccccgccacccagagatcacgtttcccagtaaacccaacttccgggtcccattccaggcctccaagcccacgtgacaacaagctccgccctctgctgtcccgcagatgccactcggtgattggccgygtttgaagccgcgccccggcgtcgcgttgcagccttaggtccagccgagcgccgactcacgccccagccccaattgggcggccggtttccaattggaagggcttttgagcctcagtcttcgggcggcgctgaccattggcgggcaggatggaggcggagccttgggttgtcgcccccccccgggggttaaggtgagcgactgcaggcaaacccggcgacagcgcagctcgcgtcgaccctggctcctttgcctgccccgtcaggtgagcctgcgctagacccccgtccccttcctgcgcccgcccgaatgcgcctgcgcggcaacagccgcctgcccttgcgccccttccccatgcctcctgggcacatctccccactcccctccatgccctgccatcatcccgcccccaggctcttctgcggggtctccccagtccgggtccttcccccacccccccccaccccccaggannnnnnnnnnnnnnnnnnnnnnnnnnnnnnnnnnnnnnnnnnnnnnnnnnnnnnnnnnnnnnnnnnnnnnnnnnnnnnnnnnnnnnnnnnnnnnnnnnnnnnnnnnnnnnnnnnnnnnnnnnnnnnnnnnnnnnnnnnnnnnnnnnnnnnnnnnnnnnnnnnnnnnnnnnnnnnnnnnnnnnnnnnnnnnnnnnnnnnnnnnnnnnnnnnnnnnnnnnnnnnnnnnnnnnnnnnnnnnnnnnnnnnnnnnnnnnnnnnnnnnnnnnnnnnnnnnnnnnnnnnnnnnnnnnnnnnnnnnnnnnnnnnnnnnnnnnnnnnnnnnnnnnnnnnnnnnnnnnnnnnnnnnnnnnnnnnnnnnnnnnnnnnnnnnnnnnnnnnnnnnnnnnnnnnnnnnnnnnnnnnnnnnnnnnnnnnnnnnnnnnnnnnnnnnnnnnnnnnnnnnnnnnnnnnnnnnnnnnnnnnnnnnnnnnnnnnnnnnnnnnnnnnnnnnnnnnnnnnnnnnnnnnnnnnnnnnnnnnnnnnnnnnnnnnnnnnnnnnnnnnnnnnnnnnnnnnnnnnnnnnnnnnnnnnnnnnnnnnnnnnnnnnnnnnnnnnnnnnnnnnnnnnnnnnnnnnnnnnnnnnnnnnnnnnnnnnnnnnnnnnnnnnnnnnnnnnnnnnnnnnnnnnnnnnnnnnnnnnnnnnnnnnnnnnnnnnnnnnnnnnnnnnnnnnnnnnnnnnnnnnnnnnnnnnnnnnnnnnnnnnnnnnnnnnnnnnnnnnnnnnnnnnnnnnnnnnnnnnnnnnnnnnnnnnnnnnnnnnnnnnnnnnnnnnnnnnnnnnnnnnnnnnnnnnnnnnnnnnnnnnnnnnnnnnnnnnnnnnnnnnnnnnnnnnnnnnnnnnnnnnnnnnnnnnnnnnnnnnnnnnnnnnnnnnnnnnnnnnnnnnnnnnnnnnnnnnnnnnnnnnnnnnnnnnnnnnnnnnnnnnnnnnnnnnnnnnnnnnnnnnnnnnnnnnnnnnnnnnnnnnnnnnnnnnnnnnnnnnnnnnnnnnnnnnnnnnnnnnnnnnnnnnnnnnnnnnnnnnnnnnnnnnnnnnnnnnnnnnnnnnnnnnnnnnnnnnnnnnnnnnnnnnnnnnnnnnnnnnnnnnnnnnnnnnnnnnnnnnnnnnnnnnnnnnnnnnnnnnnnnnnnnnnnnnnnnnnnnnnnnnnnnnnnnnnnnnnnnnnnnnnnnnnnnnnnnnnnnnnnnnnnnnnnnnnnnnnnnnnnnnnnnnnnnnnnnnnnnnnnnnnnnnnnnnnnnnnnnnnnnnnnnnnnnnnnnnnnnnnnnnnnnnnnnnnnnnnnnnnnnnnnnnnnnnnnnnnnnnnnnnnnnnnnnnnnnnnnnnnnnnnnnnnnnnnnnnnnnnnnnnnnnnnnnnnnnnnnnnnnnnnnnnnnnnnnnnnnnnnnnnnnnnnnnnnnnnnnnnnnnnnnnnnnnnnnnnnnnnnnnnnnnnnnnnnnnnnnnnnnnnnnnnnnnnnnnnnnnnnnnnnnnnnnnnnnnnnnnnnnnnnnnnnnnnnnnnnnnnnnnnnnnnnnnnnnnnnnnnnnnnnnnnnnnnnnnnnnnnnnnnnnnnnnnnnny

SEQ ID NO: 94467 - DNA, 16981 bp, Homo sapiens
aaatacagagctgccaccgtggaccagacactgctcgtgataccgagggtatagctgttaacaattcttgctttcattaagcatggactctgctgggtttgaaaacactgaattcgaagttcttcagaactgaatgtaactatgtgaatctggccagttccttaattttctttcaacttggttagttcacataagcgtggcaatcgcaaaaatacagctgtgaaaatagaagccagatgggcacccggcggtctggccttaggccctgaagtgcaggtttgaggattggtgcttgcgaagtcctgctaggcctgaactcaggtgttgggggacgtcagagccgccaaatacacccaaaagaccgggaggactcacggccaccactttcctcggtgggagctgtcccagctggtcagatcgcgcttgctgggacctgggatctcgcaacgcatgctgggatgcccagcatctaagggcgcccattggtcccgcccccacgacttgagcaacagccaatcagaggtggcagcgtgcggaagcggaagtgaggtttccgtggagacagccgagcctgcggaaggcggcggcggcggcacctgcgatcagcggctggggcaggttatggtagtgcggactgcggtgtgagcagagcggccacggggcccgccatgcgccggcggccctgacatgggcgccagcgggtccaaagctcggggcctgtggcccttcgcctcggcggccggaggcggcggctcagaggcagcaggagctgagcaagctttggtgcggcctcggggccgagctgtgccccccttcgtattcacgcgccgcgggtaagggcatgggttccaccctggcggggggaacaggcgggcggccaggcgtcccgcgccacgggggaacttccaccgctgtaccccactacagccaagccaggacgacccccatattttgagcctcattggagctgggggtggagaaagccgggcagtggtctcctggcggcctggccactctgaaagtctccctagggaagagtgggcctgaggcttgtcactggtcggaccttccgcacggtaaagctaagctagggcctccataagacctccataagatctcttcctttcatcccttccggctcagcctgcatactgaagggtcctagcctccctttcccccccagttattccaaggggataataaccctctgtttaggctgcttttcctgacagtagtggggctgaacctttgagcgtagtggctgggaaagcagggataggcctcagtattgggggtgaggctgaggaaaaaagaccctcacccagttatgttctccagatccagagcgctgacctacccacccaacccccagcccagtctcccagaggcccgcacaagagtaccagattggcttggctctagtgggctcctggagatgggcgctccctgtgctagagatttggctgtagacaccaggaagacccaacagtggcaattcaccagccacctggggtgtggggtcaggggagacgcagccttcattcctttgtgcttcttcctagcttaggcttctgctatttcagtctttgacactgggccagcagcatcttctggagtgagaccaacatgcccaggccaccaccctgcccactctagaagtcctgggtgaaggcaaagtcctgatattagaatggctgcccttgctgaacaaatcaaggatgagaactggccttggtggctgcctggatggtgtgctctggtgtgggctctcttcttgggggtctgacatagtagcactgcccacccatcacctcacttcccactttcttctagtagaccccaaaccccaggcaaaggattctccaggcaggccaggcaccgtggctcacgcctgtaatcctaacactttgggagatgaagacgagtggattgcctgagttcaggagttcgagaccagccagagcaacatggcaaaaccccgtctctactaaaatacaaaaaattagcagggtgtggtggtgcatgtctgtagtcccagctacttgggaggctgaggcaggagaattgcttgaacccaggaggcagaggttgcagcaagctgagatcgcgccactgcacctccagcctgggcaacagagtgagattctgtctcgaaaaattttttttaaaaaaaggattctccaggcatattatcctcttttcttcccacttggggttgggaagaccacagacttccccgtgacctgtgacatttgccatgcccaggtgtggggctccagcccagcctgtttccttctccctctacacagctctatgttctatgatgaggatggggatctggctcacgagttctatgaggagacaatcgtcaccaagaacgggcagaagcgggccaagctgaggcgagtgcataagaatctgattcctcaggtgaggggctgggcagyggtcacagagcctacactaagcgtgtggaggtggacccagatgggatctgttgtcatggtgggggcttttgcggggggatctgggaggaacaaggaagcttcctgaagtagaggccctgagctgacccttactagcctctgtttccatggcagggcatcgtgaagctggatcacccccgcatccacgtggatttccctgtgatcctctatgaggtgtgaccctgggaggtggcagacagaagcaccccctgccccggcaagaaactcccaggctcaatcaaggtgtggcttccattgaggagcccaggctggggccacaaccctgaataaactctgttggcccataaccttcagctgtgagcgggtcggtcccacagtattggttgggtgttggtttgtgtgtggacaagaggtggttggtgggtggtgaaggctaatggcagagttagcaccccactctcccaagccacccytgcaagcagcayagcagggcatataccagtcaggaatgcccgttacctggttccttgcctggtctgctttcttccaagtttgcctggggcctagccctgctagaggctacagcactttacaagcaaggtatgctttcttccagcccctaggctgtgggcactgtatacaagtaggaacttcctttccttcacttcccttttaacccctagtcagagcatttcagccgtttgctacctcgattcctcctgtgttggacagaggctgggggcagtgccagcctgattcttccgacctacctgccatttgttcccgccttcagatggatggacagtttgctggctattgataggagtggggactgggtgggggcttctccctctacccagggctgggctgatccccctactgcaactaactgttgccccccaaccccgaacccccagttgaggagttgagagagtgcaggctggggtcaggacaggctgcggatgcttgtgcctatggggagttactccaacccacctattctgtctaatctccatggctttgcaccaaatcctccacccctccaattgggaggggactgttcaccaccttgtggtaagggacaacaccctaaggctggtgccagtagttatgagtagcctaccaccccctcccttacagtaacccccaccccttcaggatcagtcaagggaaagcactagaacccctgggtagggaaagaaaggagggaaaaaccataaaaggaatacttataatgtgaaggtttgtaaatagtccatratgatgtcgtggcagagtctgatttctatatagaggtgactttttttttaagtactgtgcaagctctgtgcttctataatgtgggaaatggcttggggaggatggcccctagcttaggaagactgttgtgttatttgttyaatttcaataaaatgatttgtagatcctgcacatgagagtggcatcctgtgggggctctgacacccagtgtctagactaccacctgggttcaataggtaggcctggcacaggactctggcaggccccctatgaccagcaaagcccaagagtaagtctgagcccagcctgtggccatcccaactgtggccagcaggtggctgtgtgttcacacagacctcactgcaggccccctgcagggtgggagggcactcatttatctgttgtgatccatgtggtggtgacccttggaatcagaaggccctgggatacttcactaaggattggccccacctgcctgatctaaggtgagagagtgtgacccaagatagttctggaatatctgtcttagctgtagcatcgccagctgatcctaagtggggtcatggcctgacccccatggacctcaaaggcccagctttaatggacagcagccagataggtgtccccacgcctttggcctactgccaggctcagcaacccaaactcatgtgcctcctctgaggcctgcctgcggacaccatgggagaatgagctcaggctgctgtttcagcaagcaaggctcggcccactagtattgcccctgctgtctgttgcccccatcttctcatcacctgcagcctgcccactgtggtcattctgcctgcacttctcaggggctgctataaggcagattctctactaggcttaggctttgactatcagtccaactcccagttaaagaggggagatttcagggacaggcttctgagtgtagggagctggtctgccagtctttcggaggtttgaacttgtcaaggctagggcaggatcaccatatccagcctggacttgcagttctgtggggtgcctccccatacccccataagatgccaaacatgaggccctgtcatcctccatggtccccctctactggctgttcaaggcccagggctctcccatgccagatagcatcctgtctcctaccaccactgtcccagcctgagggaactccctgtgctgggcctacccagctgaccccatcgctggaaacaatgggggtcaggcaacacttccccactctctcccgccgggctgtgctcacttccttcctgctggctgcctgaggaagtgtccctgccctgggacagtctggcctagcctttgtttccccgggggtccccacccatggagctttcaaggcttctggcccctgtgaagccagcacagtggtacagggacactgcaccttcccctaccatgtcttggactccttggtcctcagggccagactcctgggtattcacctacccctcacacagccttctgttgggggagaggctcctgggcattgggccattgggttgttgaggggttggctctgggtgatttgagggtaggtagatttgcacccctggagaggtctgctggaaccttgctgcagtcctccctagggccagccacaggaacacccctcccagaggagtatacccctttcctcatccatgttgtaaggagccccctactctgtatagtggactctgaaatccatccaggaatgaactccagcaggaaagcactctgcagaaccctcccagtccatcccctcctccccaacccacacagtcacactcactaacacattgtcctgtcacacaggatgcggaagctctcagtggaaaaaaacggactcagctactggaagtccccccgaccctccccccaaggctagttcccttcttgggcacctgctctgggggaccatcagctgaacgacccccaagtattttgactcccaaaagcaccaccacctgaccccatcctctcacaccctactggatttgaggatgggccccaatcctagggaaggagtgaagaggttccctagtgttggaagctgtgggtgtgggggagattggcacctgatcctgagcccatagccttcctgtcacctggcgcagctggcggggccagatcctactcgggaagggtggggagggcagccagccagcagggcattctggagggaaacagggtcaaggcgatctcctcccccacgcctgttcctggccctttcctctcagggggcagcaggaagtgaggagaaagggctgggatgggaggcgggagcggatgggagggaatggggtttatcaagtcctcggcgagctgcccaacgggcagcagctggcgcaagtagcctagctggagaggctcaccccaggaaggagggaggccaccgacctactgggccgacggactcccacacaggtgagcccagagcagacggctggtctgcacccccacagatgcgctcgcagttgcactccctccctctcctggcgcccgggagggttaggggctggtggtgcagacgcgggcccttttgggagttgagtctcgcacaagggagcggacctaggaagagccgaggtggtttcgcacggggctcgccagggtctaagcctgccccccaccgggagaggcctgtggagcgtagggggcgctggatacgggatggaggccctgggagacccctcttgctggctttctcggaggtccagccagaaactgctgcaaggaatggaggcctcctcggggttgagagggagccgggctcccaaaggacctcagagactgggcagaaaaggacgggatctcagggatgactgtcccgccctgatgcgagtcagggagaggggcggccaacctcctagacccctctgagcttccctgaccccaaccctgcggccacgccgcgacccagagccgggctgccaggataacgactgcctcggcccttcctgggcmggctaagaagcggtgcttggccccttccctcagtctggcagggggcggggcctccctttagacggcggaccagagaagggggcccctgattcgtgggaggcggggcactactctccaggagaccagaggtcgcctcaggtcaaagtccctttttccacacaaaggggacccacggctggcgtctacgttagggggtgcagagccagatctggtgctgccccctgccaacctcggagtaccacagcacctcctgatggccgaacggggcaacgcctcctcctattcccccccccccccttcccgtccccctgccttgtccctcacactgtctctttaaagggctggcggcgccgcggagctgggaggactgaaccaccggcctcgggctgcaggggaaacatttcaggctgactggcgctcgtggctgagactcccatagaaagcccggctcagaggggcattagggtcctaaatgggcggccacgtccctctgcagaggacctggggctcttcgagcccgaaacgaggcaccggcaccgagaaaggtggaccacaccttcccgccccgtccgcaagtccaatcccgggcccacctccgcactggagtcttaaagggccagcgtgcctgggggcggagccagcagaggcgctgagccgggccgcgcctgggcgaacggccggagcgggctgggctgggcccgggatggcggtggccctggcgccggtcccggtggcgccccgcgcgaggtgagggcgggcggtgcaaacctggcggctctctccccttgggctggggtctgaatccccgggggtgctcgcggagaggcgtcccagaaaccccacccccacccgaccgggcgcaggccccacgtgtggggcgggggcggggtcccgcacaaagacccggcggagcgcgctctagccctgagcggccgggcgggggaggcgagcgcgcgcattcccggtggcggtggagggaagggccgggcggccggcgccgccgtgggaggtccgctgcccctttgtcccyacggggcctcctccaagccgggagagtgtcagcgctcgagagaaagtccggagagcctcactcttctgccgggcgagtgttacacggatagaagcctcccggcagcgttccttccagtttcgtagcctcttgacgagctgttccctgctttacccaaatgctgtcgtttctctggatcaagggttcttcacggtgtacagggtgggcatcagctgttcagggttctctgaaaccatgtactggatggtatgcaggcatatatgtgactctggtgagcccaaattatctagttcttagaagggtcacagacctaatagagatttgtgccgagccacaggctacctgctccagaaaagagccctgtgcttctggcagtgagttcccagggtgccttgtctgccctgcagtggcctgtggtctctcaaacctattacagccatgagcacagtgcccccacacagcatgggctttgggagcatagatgggcttgaggtgggcacttccagtattccctagactgacttgttctccccaacccttcttccagttcctgagctggtgccaggcaggtgacacctsctgcagcccccagcatgcgggcaggcccaggccccaccgttacattggccctggtgctggcggtgkcatgggccatggagctcaagcccacagcaccacccatcttcactggccggccctttgtggtagcgtgggacgtgcccacacaggactgtggcccacgcctcaaggtgccactggacctgaatgcctttgatgtgcaggcctcacctaatgagggttttgtgaaccagaatattaccatcttctaccgcgaccgtctaggcctgtatccacgcttcgattctgccggaaggtctgtgcatggtggtgtgccacagaatgtcagcctttgggcacaccggaagatgctgcagaaacgtgtggagcactacattcggacacaggagtctgcggggctggcggtcatcgactgggaggactggcgacctgtgtgggtgcgcaactggcaggacaaagatgtgtatcgccggttatcacgccagctagtggccagtcgtcaccctgactggcctccagaccgcatagtcaaacaggcacaatatgagtttgagttcgcagcacagcagttcatgctggagacactgcgttatgtcaaggcagtgcggccccggcacctctggggcttctacctctttcctgactgctacaatcatgattatgtgcagaackgggagagctacacaggccgctgccctgatgttgaggtggcccgcaatgaccagctggcctggctgtgggctgagagcacggccctcttcccgtctgtctacctggacgagacacttgcttcckccckccatggccgcaactttgtgagcttccgtgttcaggaggcccttcgtgtggctcgcacccaccatgccaaccatgcactcccagtctacgtcttcacacgacccacctacagccgcaggctcacggggcttagtgaggtatgtgtctccagggccctgccttttttctccttccttgaggatccactgcacatttgggttatcaggggccactataggactatacctgtagtttattggctgctccacatcccctcaaatcattctgtctataacctgaaagggtgacatcattatccccatttttcagatgagaacaattgaggcacagcgatgctgagaagtttgcccaaagcttcccagcaaatccagagcagagctgggactggggcccaggccttctaactttggaatccatcctgatagctgcacctaggctcaagtgtgcccttggcttgggaaactgagccccaaaagtggggtggaaatggacttaaatgtttaaaaaggaagcaaaacaaatgagcctctgcctggacgtgaaatgggggttgagctgggagttcagcaggttgaatcaggctggggtctgccctccttgtctgttcctgtcaccctgtggtctcagtcttccccagtgaccatcccttttcctgcatagatggacctcatctctaccattggcgagagtgcggccctgggcgcagctggtgtcatcctctggggtgacgcggggtacaccacaagcacggtaagcgagacccagcctgccagagctcagtctatgggacagacagagagttagggcctttggctaccaacctcaggtgggcaatcctagtctggtccccttgtctgtctcccacccgaggcatccctggtggcaacaggaggaggtcaccccggccctgctctcaggaaagaggaaatgctgtcctgaacagctgttgagttccgcccttccccatctgcccaactgggttccggtctgtacccccacccacttctcagcaggagcagggactgtgtggctcaggtgcagattgaatgtatgaatgtgtgcagttaaaataaggtatagtcatcacagtgtggacacagtttccatctgggcctgtgggctgaggcagctgaccctgacctgtggtccttgtcttctgcctccaggagacctgccagtacctcaaagattacctgacacggctgctggtcccctacgtggtcaatgtgtcctgggccacccaatattgcagccgggcccagtgccatggccatgggcgctgtgtgcgccgcaaccccagtgccagtaccttcctgcatctcagcaccaacagtttccgcctagtgcctggccatgcacctggtgaaccccagctgcgacctgtgggggagctcagttgggccgacmttgaccacctgcagacacacttccgctgccagtgctacttgggctggagtggtgagcaatgccagtgggaccataggcaggcagctggaggtgccagcgaggcctgggctgggtcccacctcaccagtctgctggctctggcagccctggcctttacctggaccttgtaggggtctcctgcctagctgcctagcaagctggcctctaccacaagggctctyttaggcatktaggaccctgcagggggtggacaaactggagtytggagtgggcagagcccccaggaarcccaggagggcatccataccagctcgcacccccctgttytaagggggaggggaagtccctgggaggccccttctctccctgccaraggggaaggagggtacagctgggctgggkaggacctgaccctactcccttgccctagatagtttattattattattattttggggtctcttttgtaaattaaacataaaacaattgcttctctgcttggattttgtacctgggctaaagtgtatgcgagattccagaatttcccatggggtttgagctcagctctgtctctatgaaaccctctgctggggacttctcgtgtaagatgtattcaccaagacttgggggcccagagctgcccactctggagctgttctgctggggcaggagccaccccagtgggagtggagggacccacattccatcccaacaccaaggacgttgctttctccgtattggttgcaagggagtcaggccccgccttgtgtgagggacagggctcattgtgtttctgccacttgcccctgtcctcccagctggaccagtgccagcctccttgccaacccaagggagaaacgtttgatcttccctgctgttcccacaggcaagggtgtctcctccagtccctgctcccaagggcagtggacaccagccacatacacctctcatcagggtcacagccctccctcggatctggtggtgggaggtgggcaggggattgggatctgaatcgtgaggttcagtccctgtcccattctagagatgcctgatggggctgggaggtggcatcttgggcctgggagcaggaacatcttctaaggtctgctccgtcctggctgtgggagagtatggctagtctctggctgtccctgaggaaagaaggagcagctggagttgtcagaccagctctgagctgcttcactagccctgcctctgacgggagtgcattctgcctctcccctcagccagcaaccccacacctggggtcccgcccatgtccgtgatgactcaccacgcagccctgcttcaggaggctctggctctggggagacagactcaagaagccgttgagtggtgagggcagccagcagcaggggagcaggggtggtgcccttggagatgcttcccacattgggttctaaaaggtgagggcggcagctcgatgctcaggaacaaatcctgggcagaggctggaggaagttggaggtggtgaaggtgaacagttcagggctggggtgtggcttagtggctgctgtgggcagaggcaggaggggcagccctagagcagcaccaggcctgacttcacctaatactgacttactcattcagtaaacgctgagcacacagtgtgcctgtgctgggctaggtgctggggatgcatcgatgatgcatctatgaaccacaccaacaaagacccccgtccttgtgggagtgacaaaatagaggtagatgcacactagatgcaaagaccgagatgccagatgggagaaacaagcccggccaagccagtgccaacccaggctgtaaagatatccttccctcacctctttcgccggtgatgggtagagaatggagaggagagagtgaggtggtaacactggaaaggtgacgtggtaaattcacacagtgaaggaggaggtgcacatacaagtggaggggtcccaggtgctcatggccatggtggggggaggccaggctggagagaagattcaggtgttggtcaataaaatgatgggccgggtgcggtggctcacccctgtaatcccagcactttgggaggccaaggcaggtggatcacttgaggccaggagtttgagaccagcctggccaacatgctgaaaccctgtctctactaaaaatacaaaaattagctgggcatccgggcctggtggttcacgcctctaatcccagcactttgggaggccgaggcggacagatcacaaggtcaggaattagagaccagcctgaccaacgtggtgaaccccatctctactgaaaataaaaaattagccgggtatggtggtgcctgcttgtaatcccagctactcagaaggctgaggcaggagaatcgcttgaacccgggaggtggaggttgcagtgagccaagatcacaccactgcgctccagcctgggcgacagagtgagactctgtctcaaaaaaaaaaaaaaaaattagctgggtttgttggtgcacacctgtagtcctagctgcttgggcagctgaaacacaagaatcacttgaccccaggaggttgcagtgagcggagaatgggccactgaactccagcctgggtgacagagcaagactctgtctcaaaaaaaaagttgccacaataagatgatggcacttagcaaaaggacagcaggaaaggagaaaggagctgtggcctgtcccccatacctgtgacttcctgcacctgtgacctcccccacacagatgtgacccatgcatacctctgagctaccccacccacacccaacacacagaggtgatccagaccacaccactgtgacctttcccacctagctatgacccctacatacctgtaacccctcccatgtgtgaccccatacagctgttaccgtctccaaataactgactcctccgcaactgtgacctctcctgcatagctgtgaccagtacccatcgagctgtgaccccctccatataaacctttatgaacctcacatttcttcccccggaggacctaaaagatggtcctagggaaagtgcaactcagggagagccagcactgtcctgtggggaaagcggggagtgggtaggaataaggtaatggggagtgatgcggctcagagatctgaagtgttgaacaaccggagacagcaggcgggactggaccatcaagctgatggaccccagacatatgcgcacacacacaccatttgagccaatcctactggaccagcccagtaggagcaggcctgtgggcagggccctggggtggaggaggatttcaggcaccctcagcttcttcctatggttccaccattagagcttctcccttggactgaggccagctggagaatgctggcctggtggttacctggattgggccaactgcagcactaggtttctgggggcaccaggaggtggcatgaatccttgaggaggggggccaggggttgccttgatgttctgttccctcagccctcaagagttgtgccaggctctctgggcctacatggtcatcactctgggaccctgcttcctgaactggatcagcagtcaccacttctggggcttgatcttgtgtacaagtctcatgctgtccccagcatcctgggcccttctttccctcagccctgccagcttttctatcccaggcagcctgtaggacccaacccagatggtagttaactgtgagtttcgttgcttcagtggccaccgtgccaggggtggcctggctacagtggctcagtctcagacttgactcagatccaggtagcactttcacttgggcagggacatggtgtttccttcaacctactctggcaggcaaggctgggcccaagcacctagcaggtgtcaataaccagcttctgaatcagctgtgaacccagaaaatctgacaaaggtctcagttaacttagaaagtttattttgccgaggttgaggacttgctggtgacacagcctcaggaagtcctgaggacatgtgcccagggcggttggggcacagcttggttttatagattttagggagacatgagacattaatcaatatgtaagaagtacattagttccagaaagaaaggtggagactgctcaaatcaaggctcccaggctcaaagcactgggggcttccaggtcacagataggtgagagacaaatggttgcattcttttgagtttctggtaagtctttccaaaggaggcaatcagaatatgcatctatctctgtgagcaaaaggatgacttgaatagaatgggaggcagatttgtcctgagcagttcccagcttgaagaggcccaagatactttcctttcacatttaccccattttctttttcaaaatcttttggagaaagcattttgcaagaaaatgagtatctggtctcaggtttcatctgatctctcattgctagataagtaggtccggaaagctcatttttagcaggttgtaaagtctcatgcagtgtgaagagaaaatagggagaaggaaggaagagaaaaaaaaaacagcaaaagaacaatcccagccctggcggggtggctcatgcctgtaatcccaacaatttgggaggctgaggcgggtggatcacctgcggttgggagttcgagaacagcctgaccaacatggagaaactctgtctctactgaaaatacaaaaaactagccaggcatggtggctcatgcctgtaatcccagctactcaggaggctgagacaggagaatcacttgaacccaggaggcggaggttgcagcaacctgacattgcgccattgcactccagcctgggcaacaagagtgaaactccatctcaaaaaaaaaaaaaaaaaaaatcctgggaaaatataggccacattactctgaagtccatacattggtaggcaggtatgaaagtggcttatgtatgtacataaacaggttactgttactttcttctgaagtgtaagttgtctgactttagttgacacgcttttaagaaaccacagctagggccgggcgcagtgactaacgcctgtaatcccagcacttcgagaggccgaggcggccggatcacaaggtcaggagttcgagaccagcctggtcaatatggtgaaaccctgtctctactaaaaatacaaaaattagccaggcatggtagcaagcgcctgtagtcccagctactcgggaggctgaggcaggagaattgcttgaacctgggaggcataagttgcagtgagctgagatcgcgccactgcactccagcctgggtgacagagcgagactccatctcaaaaaaaaaaaaaaaagaaaccacagtggccgattgcagtggctccccctccccctccccctcccctccccctccccctccccctctccctccacggtctccctctgatgccgagcggaagctggactgtactgctgccatctcggctcactgcaacctccctgcctgattctcctgcctcagcctgccgagtgcctgcgattgcaggcacgcgccgccacgcctgactggttttcgtattttttgggtggagacggggtttcgctgtgttggccgggctggtctccagctcctaaccgtgagtgatctgccagcctcggcctcccgaggtgctgggattgcagacggagtctctcaatggtgcccaggctggagtgcagtggcgtgatctcggctcgctacaacatccacctcccagcagcctgccttggcctcccaaagtgccgagattgcagcctctgcccggccgccaccccgtctgggaagtgaggagcgtctctgcctggccgcccatcgtctgggatgtgaggagcccctctgcctggctgcccagtctggaaagtgaggagcgtctctgcccagccgccatcccatctaggaagtgagcagcgcctcttcccggccgccatcccatctaggaagtgcggagcctctctgcccggccacccatcgtctgagatgtggggagcgcctctgccctgtcgccccgtccgggatgtgaggagcgtctctccctggccgccccgtctgagaagtgaggagcccctccgcccagcagccgccctgtctgagaagtgaggagcccctccgcccggcagccaccctgtctgggaagtgaggagggtctccgcccggcagccaccccgtccaggagggagatgggggggtcaaccccccgcctggccagccgccccgtcctggagggaggtgggggggtcagccccccgcccggccagccgccccgtccgggagggaggtgggggggtcagccccccgcccggccagccgccccgtccgggagggaggtgggggggacagcctcccacccggccagccgccccgtccgggagatgaggggcgcctctgcccggccgcccctactgggaagtgaggagcccctctggccggccagccaccccatccgtgagggggggggggatcagccccccgcccggccagccgccccgtccgggagggaggtgggggggtcagccccccgcctggccagccgccccatccgggaggtgagggg

SEQ ID NO: 94468 - DNA, 110577 bp, Homo sapiens
aggcatgtgccaccacacccagctttttttttgagacggaatcttactgtgttgcccaggctggagtgcagtggcgcaatcttggctcacggcaacctctgcctctcaggtttgagcgattctcctgcctcagtctcctgagtcactgggattataggcacgcgtgactacgcccagcttatttttatatttttagtagagactaggtttcatcatgtcggccaggctgactcactcaccttggtcccacagagtgctgcaattataggtgtgagccaccacacagagcctgaaatttttttttttttttttttttttgagacggagtctcgctctttcgcccaggctggagtgcagtggcgccatctcggctcactgcgagctccgcctcctgggttcacgccattctcctgcctcagcctccccagtagctgggactacaggcgcccaccaccacgcccggctaattttttgtatttttagtagagacggggtttcaccgtgttagccaggatggtctcgatctcctgacctcgtgatccgcccgtctcggcctcccaaagtgctgggattacaggcgtgagccaccgcgcccagccccgaaagtttttttaaaaaccgtaatttatttggtcttttactaaaaccatttttggaggctgtggatgaagctgaataaatattaggattttttgtttgatacattaattgcatttggtccaaacctaggcagcagatatactttgtggctccaaaatatggaatgagtgaatccccatcttgatcctatgtggctcatatctatcactttgtaattgctggcaattttagagaatttaggtgcattatgtggctttgaagccatatacagtcttttgctatattcactaggtgatggtagtttatgaaatactgtgtaagataatgtgcctggtttccatttctaaatgaaataccgtttatttttatttaaattaaaaaagttttcactcgagtgaggaattttttagttttattgaggttagcatacatataataaagtccaaaaaatcttaaatgtggagctcaatgacattttatacacacatgtacaaatacgtgtatattatacacaacagtgtaccaccaaccaaatcaagatatggaatatttccaggacccctgaagattctctcatgcttcttcccaggcaacacccccaccctaccagaggcagcccccagctgcctccagaggtaatcactattctgttgtctatttttgaacttcatataaaatggaaacatatagttatgctcttttggatgtagcaccatttattgaagacacattactttaagcctttgtgaaatacacacacacaaagatacacaccggatgactatatgtgtgaacctgtttctggactttgtttagttccactggtcagcttgccttggtcagcttgcctttccttgcgtcgataccacatatctttataagagatcttgatatctggagggataatgtcttccagatctgttcttcttggctacttttggcccttgagttcttctttagactctattctgttccattcttctatttgtctatcttcacactaagaacacgctgttttaattatcgtagctttagagtaaatcttattatctggtgaggtaaaacttccattttcttcttccttaagattattttggctattcttggccccttgcatttttatttgtaaatggtagcatcagcttgtcaatttccactacaaaaatatggtgagattttgattgagattgcactgaattcatacatgactttgagaagcactggcaactttacaatactaaagtttccaagacattacatcgtatatccttccatttatttagctcttctttcattcctctgagtgatatgttgtggttttcagactagaggttttgctaatcttttgttaagaatttttcggaatagtttatattccaatgtttaaaaattttctagttgctgttgctatgtagaaatacaactgctttttctgccgggcgcagtggctcacacctgtaatcccagcactttgggaggccaaggtgggcggatcacgaggtcaggagatcaagactatactggctaacacggtgaaaccccatctctactaaaaaattagccaggcgtggtggcgggcacctgtattcccaactacttgggaggctgaggcgggagaatggcgtgaacccaggaggcagaggttgcaatgagctgagattgcaccgctgcactccagcctgggcgacagagtgactccatcaaaaaaaaaaaaaaaaatacaactgctttttcttatattgactttgttttcaaagacatctctaaattcaatttttttttctaatttttttatttttagagatggagtctcactatgttacccaggctggtctccaactactggcctcaagtgatcctcccactttgacttcccaaagtgctcggattacaggtgtgagccactgcacctagcctaaattcacttattaatctaatagttgacctgtagattactttggattttctatgtgtacaatatattggctataatatcaactttgtttcatcctttccaatcattataccacttcttaattttcctcacttgttgctataactatacagtatagaacagaagtgatgatagtggccatccttatcctgtgtccaagctcaagtgcgggtgcaatcactcagaaaactgttcagcagtgtatgatgaacatatagatacactgcaatccagcaatcccactcctagacatatgcccacaagaaatgagtgtatgtctaccaaaagacaaggacaaacatgtccttaatggttctcttcatgagaaggccaaactggaaacaaccaaattcagaacaaataaatggtagtagactcaaacaatcatatgctatttagcagcaagaatgaacaaactattcctacaacgtggatgactctcactaacttgagcaaaagcagtcagacattaaaaagcacatattatataattaaacaaagttcaaaaaaggcaaaactaatctacggtgttagagggcttggggctggttactcaagggggaggatttaggatggcgctccaggggctttctggaggagagataaatttcctgttcttggcctgagtattgatagacagctatgttcactctgtaaaaactccctgagctatgcacttgtgatttgtgtgcatttttgtgtatatttcaattaaaagtttattaaaaactacatatatttaactgaagttcattctcactgtaatctgtacaatctgaatttgtataacaaatgtctgcccagctctataaatgtacagctcttgtagacaccaggcttttaggctgtattttgatatgcttgtgcctctgaagttctagctataagggtagtctgtttgtgctgctataatgaaatagctgcaactgtgtcatttgcaaataacagaaatttatttctcacagttctgaaggctgagaagtccaaggtcaaggcaccagcaggtttggtgtctgctgaaggcccattcctcatggtgccacctaggggccttcacatggcaggacagaagggcaaaaacggcccaagctaattccctccagtccttttatgaggcactaatcaaattcatgagagcagaaccctcataacttaatcacttccccaaatgccaacctcttaatactgccaccatgaggataaagtttcaacgtgaattttggaggggacaccattattcaaaccacaggaggggctatgggtagtaagtagagttttctctgaaaggggtataaattatacattgaggggagagagcctcttaaacagtatactaaagtgcagaaggcaggccttgttccagtgaaagaagggactccaaactctcgctatgcttcatttcctttggtctagagcagtggttcccaaacagggattgaaggggccaaggagtaagttgaagacattgctatgaatccaaatatgtaatccaccaagcattatctgtaaaatgagtatctcatacatatatgtactattatttaaaaatacactttgctacttaatttcataattcttttaaatgaatttgtaattttttaaattaatagactttgttcattatatatttcctcaaatatataaacagtatgcacataaaagtatgcctactatcaaaggactttgaacaatttgggggcaatagggaagcctgacattttaaaatcctgagaacttctgatcttgacttcaaaaggggcaaaagtctacatttggggtcctttagaaacagcaagctaggaactagttgggttgggagtcacatatgtcggagagaccaagtcatatcttgtcagcaggatatctcgaagcaagttaacctctgttttctttttacccccgggcttcagtgcagccctgtataggtattcttctggagcaatcattctcaaactctgggggggcacaggcatccccaggagagcttgcttaagtagtctcctggggccccaacaccagagattctgattcagtagtttggggtgaggccttcaaatttgcatttcaaagaagctcacactggatgcaaatgatgctggtgtgagaaccactgttctagattcttcgctgcactcagcaaactaagataggcaaatacagctcccggaaccagagaggctgacaaatgaattccaaagagatgctgaatacttggcgataagaactgctgctttgagataaagatgctcctcctttgtagaacacagtattttttggttggaaagcaatctgatgagcagactaatgcgaacattcacaggatattctgggagataccatgcctttaatcaaaataatcagattcaatgacagaatttcagaaccaaggaccattagacattgtggggtctttcgggggaagctttcctgtatctctaaatcatactatgtaagtagaaagcttgctgactgcttttttgttaatacgatttcttctagcttccgtagccaacttttttttttttttttctggctagggttttcattattttatgtgattaaggacacttttctgccccaagtattgtaatcctctcggccggctctgtccaaaagaactgtcttcgatgatagaaacgttctacatatgtactttgccacatagcagccactagccatacatggttatggcacacctgaaatgtggctggtgccactgaggaattaagttaatatttaaaatttaaatcccaatactggacagcacggctaaacctttcctaacccttcacgtttcttatgaagattatatagcaggatattacaagcactaaaaaagaactatcttaaatctgaagcaagatgatttccctaactagtacgtttgtttggtaaaagaggacgtgctattttttacagttaaatctaattcgtaagttgtagaacgttttcttaacaaggtatccctctcccaaattccgggagaggctggctgcctttccttttgctccagcggtttatttggcataaaatctgcaggcttacaggagctgacaccagggcagaaaagaatgaggaatttgtttccaagttggtcacaggccgctaatctgacctagatgatgtttaaaataatattcaaatacagcactttaaaaaactatgaaggctgagaagaaaacgagaaatgggaagcaagaaggaaggcggagcgtgccggcgacttctcaggggacttcctcagggagtcccattccagtaaccccgcgctacccacggaccaccgcctctctcttgtcggaagacgcaagcccaaggggcggctcacctcgtgccgcgcgcagggaccacggccgccgggtggtcccctggccccgccccctcccacctgggcaccccgagccccgccccccgagcgccccgccccgccccgccgccgactycgcgccgcgctcgggcgccgagtctgcgcgctgacgtccgacgctccaggtactttccccacggccgacagggcttggcgtgggggcggggcgcggcgcgcagcgcgcatgcgccgcagcgccagcgctctccccggatcgtgcggggcctgagcctctccgccggcgcaggctctgctcgcgccagctcgctcccgcagccatgcccaccaccatcgagcgggagttcgaagagttggatactcagcgtcgctggcagccgctgtacttggtgagtcgcggacccacgcggcagtcgccgacctcctccgagacccggactcgtgccctgtccgcagggtccctcccgcctcccccgcctctcgcctctagcctctcgctcggggcggaagtggcggcgcggtccgcgtcaggggcgcgcctgcgctgaccgctctcttgctccttttggtttaaaaaaaaaaaaaaaaaaagcatacttgagctgagcagctcatggttagcgcaagcgcagttagttctggagggcggtgccacagcggcttcttggggagcgcgtggatgcgccaccagcgttgcgcggcccgggtctgggggtccttgggaaagccgtgggggcgctcgggcgcgcgcccccgggccgcagcttcgccgtagctcccacgccgctgtgcttggttcttgctcgcggacagctctttctctggccgggtgttttgtggccgggtgggcagctggcgtccccgggagcggtgagggcgggggcgggcgagccgggccgcggcgtccgggtccagctggcgcccgcgcaggacctgtgggagcaggccgctctgggcgccgggccggccgccgcagccctctgcgaggcgaagctcgctctcctggcggagccgcggtggttgggggtggctcgtggcctctggcgagggcagcgctctcgggaccctccgtcttcattttcccccgtggcccagcagcgcccagcgtgggttcggcccccatagaaccttcccggaacgaaagaggctttgcttgtgttcgtccagtgatagcgtgtcattctctttatagttttccttactgaggtatactttccctacagtgaaacgcagctttcatgtgtgctcccagacgggtgtcacaaatgaatcccctcttgcaagccccctcaaatcaaaatagcctttccttgccctgagaaagtgccctcatcccctccccgggggcacggtgttccgatgcctatcgccctaatcgtgcctgttcagctcacatagatgcaatatgtagtataaacacctgtgattcgctttttttatgtcaactagactaccttttaattcaaacaaaactttatctcttttaaaatgatgtaactgctttccccttcgtttaatccttgtcgtattattcccaagattgaatttggtgacggttaagttaatgctgcttctgatgtttggttctctctgtgtaaagtaaaagacgggctttcctgtaaatggatgatcctgggtttttcccctttccatttaattagatggcagtgaaaaatgtgttcagaaagtaacgttttcttcttgaacacattagtgggaagtataaatattctgattcccatgatacagagtatgttagaatagggatctaagttttaaagaatgctggtaaggactcttccaattatagacaatctgaaacgcaaattctggtaggaatcttcatgtgagagagcctgccagctgcatcttctccagttacatttgttttagcagaggctgctgtctctctaagggataggttatatatcgaaatagatttgaaaagagaaaagtgaatataacttaattcagcttaacattttggtttaagaaatttaattttctttggtatcattaatatccttgaaaattcaatgagaattgtgattcctctttccagaaaaatgaacttaactcgcatccactggagatttcacatscattttcaaaaagataaggaaatccttctatagattcttaccgaggaatcctgtagtttccttggttggtcaatgctcatattattttttcctagttgaaaacaagaccattagtttggtcagtagaaaccatggcatgcacactggtgttacagtaaaagtaggtcacaaaccaagaaagttagtaatggaaagcaagtcaggaagtttgagctatgtgttctcctgtggccttagaacatccattcagccattccacaaatatgcccggacccccagtggagttgcagcttttgctyctggccttggggattcagcagagaatgctcctggcaagtttcctaccctcgaggtgctcactctagggcttattcttttggggcctcattgtagttccatattttcattcattcgttcataacatgcttgttatgtgctagtgttagacactgaggattcttgttaaaagacaggagtcccagtttttaaggatgcagccctgtaaataggtaagctgatgaaaacgttaaagtgatacatgtaaagctagcttgaagcacagggtcttgtggagttgagttacctaggagtcctgtatttcccaaaaaggggtacacatgggagttctggtgaagcttctcgagggagggaggacctcacctaagtcttgaaagacattggccaggggaagaggacaagggaggtgaagagaattactgttccagcaaggagggagtgcacaaaggcactgagggaatgctgagagaaccacccacagtttagcctggagactggtgtgaagttgagatgctggagagtaaggcagagcctagatcagactaaggaatttgagctgtttaataggaactcattgtggaattgtaagtctggaaataccatgatcatatttgcttcttttttttttgacagagtcccgctctgtcgcccaggctggagtgcagtggtgcgacgtcagctcactgcaacctctgcctccygggttcaagtgattcacttacctcagcctcctgcgtagttgaaattacaggcacacaccaccatgcccggttgatttttttgtacttttagtagagacagggtttcgacatgttggccaggctggtctcgaactcctgacytcaggtgatccgcctgcctcggcctctcaaagtgctgggattacaggcatgagccactgctctgggctgatcatatttacttgttagcaagatcgttctgactgctagcagactggatgaggaaagtgtaggcacgcagcacagggcagtagtcggttggagtaaacctgaagagacatgatgagcttctgttaggcagtggcaggagggatggaggggagatacagatttgaaatgaaatggtaaaggggtatacgttatgtacaagtttggttttgaaactttaattctgtttgaggtacctgcgagacactgaaatgaagctagttgaatgtataaatttggagttcgggagagagggtctgagtaaatgtgattttggaaatcatgaacacatgggtgatatttgaggtcttagacattgatgagatcatctagggaagatacagagcgtttggaaatatcaaaggccaaggacagaatcttgacagacaacatttaaaaggatgggtggagaaagaggaacttgcaaaaaagactggtgaggaacaaccacagaagtggggaggaaagcagtggagggagttgagggtgagcagggccacctgacaggtaagggccagcctgagagggccatgacattgagcagctagattaacagataccttaaagggagttgtgtcagcggactacacaagacagatacctggagttcaggagagaaggtaggaggaaatgcaaactaccaagtgtacactgctctttttagaagcccaacttgaagaagtggggagaggtagctaaaatgaagcaagattgtgtgacttctcacttaaacccttgaacggctttccgttgctcacagtgtaaattcagcccctcctccggctcacaagacctcatggcctgtgtctcttgcttgatttcccctatcactttcctccctcttttccactgtgttgtattcttggaagtgtgtgtgtccattctccccttagggcgtttgtaaatgttgttctctttgccttggcacaactttccccccttctctttcctttcttgcttaaactgcctcctactcatccctgaagtctcacttccttggcaggccttcttgacctgcccatgctgggtatgagcccctgttgcgtacttctttagcatcccaagacttcccctttcatagcgggaattggatgtcatacagcagcaaatgatttcgggaacacaatttgcattaagcaaaccactatcttgaaagtaacacagcttgagtaggaaaaaagtgtttaaggtggctttctgctttgtttagcacagcagtgggtgatgtttctgataatgtttttgaagagttgtgctttttttggtaatgctcatggagctgggaaaagaaaggctttgctcttgagcaaaaactgagtacaactaaaagctggacttgcttagtggtaggagaacttgataccttgttgaaattctagcgggaaaaatgaatttagtattttgagtctggaactctggtcccttattcctttttgctccttttgaaaagtgtcttttatttcatgagtttgataataggaggtttcttagaaatgaattattgggttggagcagaacagactctgttaatctgagtttatattttttattacttcttcagagtttcatgaaggcactgccagtgctttgcacagtatcaggtgcttagtaagcacttgaaaatatgtgctgaatgaatgactttttaygaggaaagggcaacttgatatatttatgtgattgcagggatgaacctaaagagagaggtggaggttgaaatagaagggatgattgttggagccagaaatcttagaaagcaagagtcaatgggaccaagagcacacaggtggaagaattgatcgtgaaagagtgctggccaggcggtggctcatccctgtaatcccagcgctttgggaggctgaggtgggaggatcacttgaggtcaggaggttagggctgcagtgagccataattgtgccactgcactacagactaggtgacagagtgagatcctgtctctaaaacaagaacagcaaaacaaagggtgcagttggaaaagtttaatttggtctgattgtgtgaggttaattctgactttttgagtaatgttcatgatccctttttggcttttccttttgtcactgctgattgctgtcttcatcaggctgagctttgagaaaggcagagagaaggaatggagtctgtgtgcctactgaggaaaagactaaaactggggaatcgcaaaagctatgttatgggttgtttctaagaagtgatggctcagaaggaatttggcttatttatttttaaattcctttcttttttaaagagttctcactctgttgcccagtctggagtacaagtgcagtggtgcaatcatagctcactgcaaccttaaactcctgggctcaggtgagcctctcacctcagcctcttggaaattggttgattaattagggtttataaacaatggaactcctgactgacttcatttttctttttttgaaaccaagtcttgctctgtcccccaggctggagtgcagtagtgtgatctcagctcactgcaacctctgctccccccaggttcaagcagttctactgcctcagcctcccgagtagctgggattacaggtgcccaccagcacgcccagctaatttttgtatttttagtagaaacggggtttcaccatgtttgtcaggctggtcttgaactcctgacctcaggtgatccacctgcctcggcctcccaaagtgctgctgggattacaggtgtgagccaccacgcccagccacatttttctttttctttctttttttcctttttctttctttttttttctttttctttcttttctttttgagactgggtctcactttgtcacccagtctggagtgcagtggcgtgatctcagctcactgcagtctcgacctcttgggctttagacatcctcctgcctcagtcccccacgtagctgggcctggctaatttttttgtattttttgtagagacagggtttaactattttgcccaggctggtcttcaactcctgagttcaagcaatctgtccacctcagccttccaaaggcttaggattacaagcatgagccactgtgcctggccatttttcttttttctttttctttttttgagacagtcttgctctgttgcccaggctggagtgcagtggcgtcatctcggctcgctgcaagctctgcctcccaggttcacgccattctcctgcctcagccttctgagtagctgggactacaggcgcccgccaacactacaggcgcccgccaccacgccaggctaattttttgtatttttagtagagacggggtttgaccgtgttagccaggatggtcttgatctcctgactttgtgatccacctgcctcggcctcccaaagtgctgggattataggcatgagccactgcgcctggccgccatttttctttattagaaatttgtagttcaaatattgctagagaacaatttttaccatttgtgagtcagctaatttttagaagtcagatatcaagtgcacactgttcttctcatacttacagcggggcagccagttaggcaggtgaatcaaagctgtcttattctaaaacacttcccttgcctactagttacacattctcctgcctgctgtctaatctcagtgcttttacatggttgcacaaactctgaattcccttgaagattggctactctctcacaccttggagtcttcatgtgttggatatactccatgcctaccatatctatttgggaaacatcttcaagactagaccgtagtctccttgggcaaagttaaatgctcccccttctctcatttcttagttctctatattcttttattagaatatgaaccacattgttttgtaactgtctacttgtctgttctgtgtagctccttgagggtggtctttttttttctttgttttcccaccacctacctacgggacctgaaacatgttagatgctcagtaaatattcagtaaacacaggaaaactgttcccttttaaaatgtcagcaccttagtttattccaaacccctcatttatggctgaggaaacactgggccaatacagtgttgtgacttatctgatgttacaatatctgctagtgtcataactgggactcaaatccagtccttctgattctcgtttcagcactgccctaatttacccatgtgactacctgtagtgctttcttcttatgatctatttgagatcagtggcacagagggaatcgtcttaattttgatggctaggagggagtggatgtgttataataggtagggtcattttgggacttgaggcctttaaaacagtgtctgggatccagggatcagacttgaaaggtatttgcaaatctcctgaaactgctaaattttatgtacgtgtgttcccaggtatttcgtttctaggtgattctgtagcttttgtcagtttcttagtggatttgtctgtgatccctcaaaaggtaaagaccactgcttgaagggaaagcagccttgggatgggtgccccaatggggaatgtatacctagaaatcatattgttttgcctttgacatgtgtttatagattactgatatctataattacggaaatccagatagttgcgtttgtctcctagcttttctagttgcctcttttttgatttcttgattttaaccagaatcttctttttttcttgagaaggggtctcattccgtcacccaggctggagtgcagtggcacgatcgtaggtcactgcagactcamaactcctggctcaagtggtcctttgcctcagcctcccgagaagctgggactacaggcacacaccaccacgcctgacaaatttcttcttcttcttcttctttttgttgttgttcttgttggccaggctggtctggtcttgaactcccggcctcaagtggtctgctcaccttggcttcccgaagtggcgagattacaggcatgagccaccatgcccagcccttaaccagaattttgttttgttttgttttttgagacagggtctcactctgtcacccagactggagtgcagtgatgagatcacggctcactgcacagatgcacgccaccatgcttggctaattttttatgttttgtagagacaggttctcaccatgttgtccagactggtctcgaactcccgggctaaagcgatcttccggcttcacccttccataatgctggggagccacagtgcttggccaaccagaatcttaaaagccctttttactttttccagatagttactctgcagagaatttctgattcccagttggagaactgttacagctctctcagtcccctgctgttcttttagctaccttgtctttgtcctcttacctgtccactctctactccccttcttccctttggtctccaaatagtccagataaaccagagagatggacagataaggtctgggtacgcgaaattaaaattaacatagtgtgctcttcactttcttgaataaacgttacgtatgatttgtttcccttggaaatcctcatctagattctctactctctattccttaacttaatgccccattaaggtagttttttcttaatggaaagctgttgagagtcagaggatatttaaaccaactaataaactgaacttttaataataccacccttactttggataagagtgattagccatatactaaatcctcaatcagtttagcatgtaaaatttaagacatagcagctgataactgaggaagagatacatttccacaggctaactttaaagaatataagctctcactttcctgagtagaagaaaactaaacttttctgttctatgctttttttttttttaatttttatttttattgatcattcttgggtgtttctcacagagagggatttggcagggtcataggacaatagtgaagggaaggtcagcagataaacaagtgaacaaaggtctctggttttcctaggcagaggaccctgaggccttccgcagtgtttgtgtccctgggtacttgagattagggagtggtgatgactgttaacgagcatgctgccttcaagcatctgtttaacaaagcacatcttgcactgcccttaatccatttaaccctgagtggacacagcacatgtttcagagagcacagggttgsggggtaaggtcacagatcaacaggatcccaaggcagaagaatttttcttagtacagaacaaaatgaaaagtctcccatgtctacttctttccacacagacacggcaaccatccgatttctcaatcttttccccacctttccctgctttctattccacaaaaccaccattgtcatcatggcctgttctcaatgagctgttgggcacacctcccagacagggtggtggccgggcagaggggctcctcacttcccagtaggggcggccgggcagaggcgcccctcacctcccgggtggggcggctggccgggcgaggggttgacccccccacctccctcccggacggggcggctggccgggcggggggctgacccccccacctccctcccggacggggcggctggccgggcggggggctgaaccccccacctccctcccggacggggcggctggccgggcggggagctgacccccccccaccttcctcccggacggggcggctggccgggcagaggggctcctcacttcccagtaggggcggccgggcagaggcgcccctcacctcccggacgaggcggcaggccgggcgggggctgatccccccacctccctcccggaaggggctcctcacttcccagtaggggcggccgggcagaggcgcccctcacctcccagacggggcggctggccaagcggggggctgacccccccacctccctcccggacggggcggctggccgggcggggggctgaaccccccacctccctcccggacggggcggctggccgggcggggggctgaccccccaacctccctcccagatggggcggctcgcctggcgggggctgacccccacctccctcctggacggggcggctgccaggtggagacgctcctcacttcccagacagggtggctgccgggcggaggggctcctcacttctcagacggggcggctgccgggcggagggtctcctcacttctcagacggggcggttgccaggtggagggtctcctcccttctcagatggggcggctgggcagagacgctcctcacctcccagacggggtcgcgaccgggcagaggcgctcctcacatcccagacggggcggcggggcaaaggcactccccacatctcagacgatgggcagccgggcagagacgctcctcacttcctagatgggatggcggccgggcagagaygctcatcactttccagactgggcagccaggcagaggggctcctaacatcccagacgatgggtggccaggcagagacgctcctcacttcctagacggggtggcggccaggcagaggctgcactctgggcactttgggaggccaaggcaggcggctgggaggtggaggttgtagcgagccgagatcacgccactgcactccagcctgggcaccattgagcactgagtgaaccagacaccgtctgcaatcccggcacctccggaggccgaggctggcggatcactcgcggttaggagctggaggccagcccggccaacacagcgaaaccccgtctcccccaaaaaaatacgaaaaccagtcaggcatggcggcgcgcacctgcactcgcaggcactctgcaggctgaggcaggagaatcaggcagggaggttgcagtgagccgagatggcagcagtacagtccagcttcggctcggcatcagagggagactgtggaaagagagggagagggagaccgtggggagacggagaccgtggggagagggagaggaggcagagggagagggagaggcttttttttttttttcttgagacggagtcttactctgtcaaccaggctggagtgcagtggcacgatcttggctcactgcaacctccacctccctggttcaagtgattctcctgcctcagcctcccaagtagcagggactacaggcatgcgccaccacacccagctaatttttgtatttttagtagagatggggtttcgctgtgttggctgggccagtcttgaactcctgacctcaggtgatccacccaccttggcctcccaaattgctgggattacaggcgtgagccaccgcgtccagcctgttacattcttaattggaatagcattgccctgcagtgccattatctgaaatagcttttaagaatgaatgtaatgccattttaaatgtatttaaatgttgtgccgatttaatgttctatgtacggtacagtactactaatggttcaagaagttgttttgacttaacagtgaaatccttgcttttaaagatcatagatacctttagacacctttaagatgaaacatgtttatgagaggaaatgtccgcacaaatacaatcccccgcaaacttagcatgtggttttagtaggttcataggcccacctggtgatccctaggataagaaattgtggtcaagaaactgatttcaggggccgggctggtggcttacacctgtaatcccagcactgtttgtctcaaaacaaagaaactggctcaaggttggatacttttcaaacgagaggaatggaggaagggaatgcaatgaataacttttcaaatccagtatgtctgatttaatatgccgtttgctctgtcagtttcatttggttcgtgtcactgatcatttataaccttttttcaaactgctttcattcccctaaggaaaatctgatactgaattattttatttcttctttcactatatttgaacggttttatagtctgaaagctatcaatttctcattacagtttacttcatagtacttctaggaattcttcctgtggtttgaggtaaggctacaggattcctagagtttgtacccctctagtcccagtaaaggacctggtacatcaatcagggtagccctagaaagttggagtaacttcgtaacagtgggaactgcttctgttctatgttttttgtgggttttttatttgtttttgtttttttgtttttttgttttttttttgagacagagtcttgctctgtggccccaggctggaatgctacggcacgatctcggcttactgcaacctctgcatgcygagttcaagcgattctcctgcctcagcctcctcagtagctgggattacaggcgtgcaccaccacgcccagctaattgttgtatttttagtagagacagggtttccccatgttggccaggctggtcttgaactcctgacttcaagtgatcagcccacctctcagagagctgggattatacatgtgagccaacatgcctgccctgcctcattctttatactacagtaaagtcccggttgggcaataatctaaacataaaagaaatgaaaccataaaattatataagaaaacaatggagaaaattttttgtaatcaacagagtgaaaaaggattttttaatgccatgtcacagaaacctagagaaaaaaggtttaagtttgatttcataaaaatttaaatttttgacataaataccataaaggtcaaaagataaaaaattttaaatattttcaatatataacaaaaactaaactttcttaatatgtaaagaactacatatcaaaaagagagcggaaatacagatggcttttaaaaacaggtaaagctgttcaccttcacaataataacaatttcaaattatgactataataataccatttttcacctatcagacaaagatgaaaaagttcattaatataattgtgtaggtgaagctcaggcactttcttatattattggtgacagtatacattgatatagcttctttgaaaggttattcatagcagcattatttataacagctaaaacctagaaataacctatgtgtcccattatagatgactggctaagtgatgaatactattaaattgttaaaaagaactcattatctatatggaagtacttttaatatatactaagtgaaaaatcaaagtgcaaaacagtatgctaatatctgttttgtgagggtgggatggatacttggatggaggaagacagacaggcagtctggcttatatatggatagaatgtctcggaaaatatacaaggcactggttacagttatcacctaagggaaaggattgagggagaggagaatgtgacttaactttttcactatatacccttttgtacggtttaatttttgccaagtccatgtaatccatgtatacatagggagcatatgtatataaatatatgtaaatataagtaaaaaaatatgtatgtgctgccgggcgcggtggctcactcctgtaatctcagcactttgggaggccgaggtgggcggatcatgaggtcaggagatcgagaccatcctggctaacacggtgaaaccccgtctctactaaaaacacaaaaaaagtagccgggcgtggttgcgggcgcctgtagtcccagctgctcgggaggctgaggcaggagaatggtgtaaacctgggaggtggagcttgcagtaagccaagatcgcgccactgcactccagcctgggcaacagagtgaaactctgtctcaaaaaaaaaaaaaaaacaacacgcttttctctctctctctctctctctctctctctctctctctatatatatatatatatatatacacatatatatatacgtatatatatacatatatatacgtgtatatatacatatatacgtatatatatgtatatatacacatatatatacacatatatatgtatatatatacatatatatacacatatatatgtatatatacacatatatatgtatatgtatatatatacatatatatatatatgctaaagttaagtactggattcctatctgtatctgctacctaactgcagtataaatcttggaagttgagtctgttttctcatttgtaaccacctcttagataacacacataaaagcacatagcacatgcctgacacacagtagggttcagtgacagtgagctgttttagtctctaaactctcttcctcaaagagagcttctcaaagaaaaaaaaatgtagtgaagaaaagaacttactccaccagggatcttctctccccagccagtggcaggcatattaagggctataagtaagtggttattttaccatcctaaagtaatggtgtttcaaagtatgcaagattcttcatacttcactgtgtccttttctgagcatctttgtagagagtatatgcacaaacatctgactaacaaagggaacacttttcatcatataatttaggattcacttagagacctaaagtataaagaaagaaacttaggtatgttagcccataaggagaaactcattatcaatttgggattatcttaaggtcctaccttataaaattaaaatttaacagaagattattctttttcaatttcctaagttcttatttgctactacatcgtagcagttcgagggagaatttggtctaacgatgtaatgttttctgtatgccatacatagaacaaagctatgtacgaaatactaaaaatattatttgacattatttaataaaatattataactatttcaccccgataatgatggaaattaagttgcagtaatatagatttttaaaataaaaacttcaaaaccaggcgccatggctcacgcctgtgataccagcgctttggaaggccgaggcaggcagattgcttgagaccaggagtttgagaccagtctaagcaacatagcaaataaaaataaaaaattagccaggcatggtggtgtgcctgcagtcccacctacttgggaggctgaggtggggggatcacttgagcccctgaagtcaaagctgcagtgagctgtgatcacaccactgcattccagcctgagtgacaaggcaagactttgtctcaaaaatataagtaaaataaaattaaaattttacttgtttatttttttgagacggcgtctctctttttcccaggctggggtgtagtggtgtgttctcggctcaccgtaacctctgcctccggagttcaagcgattctcctgcctcagcctcccgagtagctgggattacaggtacgtgccactatgcccagctagtttttgtacttttagtagagacagggttttgccatgttggcaaggctggtctcaaactcctaatgtcaagtgatccgcctgcctgggccccgcaaagtgttgggattacaggcgtgagccaccgcacccagccttaaaactttaaaattcagaatatgagcctttgttttatagcttcacttgttaaaacaaatcaggagctgggtgtggtagctcacgcctgtaatcccagcacttggggaggctgaagcgggcagatcacctggtctcaatctccctgaactcgtgatccgcccgcctcagcctcccaaagtgctggaattacaaacgtgagccaccacgcccggcctgaagtttgaagtttttaaaaagaaagagttgttaggcataattgtgtaaatagaggtaaaaattgacagcaagaaaggcagtagaaaactatgacaaatgaaggtgatggctcacgcctgtaatcccagcactttgggaggccaaggcgggcggatcacctgaggtcagtagttcaagacaagcctggctaacatggtgagaccctgtctctactaaaaaatacaaaaattagccaggcatggtgatgtgcacctgttatcccagtcacttgggaggctgaggcaggagaattcacttgaacccgggaggcggaggttacagtgagctgagatggcgccacttcactccagtctctccagtcagtccagacagagtgagactcaatctcaaaaaaaaacaaaaaacaaaaaacaacaactatgacaaataagtgtaatttcccaggactattaaggtcttgtaatcccatgcactggaagcttttgttgttgttttctgatttatcattgaagtgaccaaagcgcagtggtaagaacaagcctttgtgattacttcacactagagaagggtctttcccacatatttgagacttaaggagttgatagtgaacagtgtaagcggccacacaggtgtgggttaagaactgatgtgtgtattcactttctgtaaagatgaccaaacatatgttgttagacaaacgaaaaattcaccccaagatcattgagggcatgcaaaatagtatgaggtagaggcagctgtaattcaggtgtccaaatacaagagcaggtggagaaaagaaaagaaactgagaacagtaaagagtttttaaagttataacacacaattgttaaaatagaatgttcagtaccaagtagcagagtagataatgcagaacactgaggtggcttgagaaaaatctctcagaactcaggaaagaggtgtgcgaaatgagcgttaggagagagcacttccccaagtctgtgatagaaattcctgaaagggaacagaggagactgaagcgaaactctattaagcgacaaggaagactcaaatggagaagctaacccagttccgatgaagacttggcacatatctataatgtattttttttgaagtcagccaaaagaaagtttaaatttgaggtacatctgaaagagtaagcaatacagaaaaatcttgacaacatctgaggacaaaaaaaaaagtactgatactgttgagtgtgaggcaaaacctcactttcagtctttcttgagaaatattggcaaaatatgcccttaatacaggagttccatttttatttcatttatttatttatttatttatttattgagacaggttctcactttgtcacccaggctggagtgcagtggtacagtcactgctcactgcagccttgacctcctgggctcaagtgatcctcccagctttgcctcccaagtagctgggactgcaggcacgcatcactacgcttggctttatttttatttattatgtgtttatttttatttttattttttgtagatacgtggtttcaccatgttgcccaggctggtcttgaactcctggcctcaaatgatcctcctgccttggcccagagtgtttttgttttttttttttgtttgtttgttttttgttttttggagacaatcttgctctgtcacccaggctggaatgcagtgagtggcgcgatctcggctcactgcaaccaccgccttctgggttcaagcaattctcctgcctcagtgtcccgagtagctgggactacaggtgcccaccaccatggccagctaattttttgtattttttagtagagatggagtttcaccatgttagccaggatggtctcgatctcctgacctcgtgatttgcctcggcctcccaaagtgctgggattacaggcatgagccaccacgcccggccgagatatatttcacataccataaaattcacctaaaaggtacagtttagtggtttttagtatattcacagctgtggaactaaatcttaatttcagaatattttcaacaccccaaggagagactgggtacatacagttattctccattctcacccacatcccaacccctgacaaccactaatctactttctgtctccagatttccctgtcctggtctcataccatgtgtagtcttttgtatctgtttttttgttttgttttgttttgttttgttttgttttgttttgtttttgagaggagtctggctctgtcgcctaggctggagtgcagtggtgcaatcttggctcactgcaagccccgcctcctgggttcacgccattctcctgcctcagcctccccagtagctgggactacaggcgcccgccaccacacccggctaattttttgtatttttagtagagatggggtttcactgtgttagccaggatggtctcgatctcctgacctcgtgatccacctgcctcggcctcccaaagtgctagggttacaggcgtgagccaccgcgcccggctggtttctttaacttagcataatgttttaaagtttcatctgtgttgtatgtatcattactttgtttcttcttctaagttagtaagattccattatatagatatataccattttgtttatccattcaccagttgatggacaaatgattgttttagctattattaaaagtgctaccatgaacatatgtgtccaagtttttgtgtgaatgtatgtattcgtttctcttgggtatgtgccttggagtagaatagctagttcatatgttaactctttgttcagcatttgtttttctaaagtggctacatcattttaacctttagttttttgttttttggktttttttttgggagtggggtggggctggagtgcagtggcgttatctcggctcactgcaacctccgcctcctgggttcaagcaattctcgttcctcagccttccgagtagctgggactacagacacatgccatgacgcccagctcactctttttgcccagctcactctttttattttagtagagacagggtttcaccatgttgcccaggctggtctcaaactcctgagctcaggcaatctgcccacctcagcagggtttcaccgtgttgaccaggctggtctcaaactcttgacctcaggcgatccacccacctcagccttccaaagtgctaggattacaggcatgagccactgtgccccgcctctctcttttttttttttttttaataaagacagagtcttgctctgttgtccaggctggcatgcagtggcgtgatcacggcttactgcagctttgacctcctgagctcaagtgatcctcccacttctgcctcccaagtagctgggaccacagatgtgtaccaccatgccttgctaattttaaaattttttaatagagatgggggtctgtctgtgttgcccagactggtctcaagtgattctcccacctcagcctcccaaagtattgggattgcaggcatgactcacagcgcctggcctcagtttctttcaagaccatcctataacaccaagttagtttgaggattctatgaatgtctgcttaaagatatccttctgaattctgtgattctcttgaaaggcttgttgcaatgaaaaacaaagtataatgatgactttatgtgaagtatacttttggaatttcttaagcagaagtcctgagacttttgagagtccctgtatttaaacagtaccatttaggcacagttactgcttatgaaatgaagagtagctagatgaatataaaaaatcttactcttacatttcaacccagcattatttgaacccagcaaaattatttctatagtagaatcaatttagttccttattttaagccatgcatatatatctcaaagcaaatttcaagagggattaaatgttaytatgtgaaaatattaggaggtgaaataataggagaaagtaaacacattgaaagtaggtatgttcaggccaggcgcggtggcttatgcgtgtaatcccagcactttgggaggctgaggcgggcagatcacgaggtcaggagatcgagaccatcctggctaacacggtgaaaccccgtctctactaaaaatacaaaaaaaaattagccgggcgtggtggcgggcatttgtggtcccagctactcgggaggctgaggcaggagaatcgatttaaccctggaggctgaggttgcagtgagccgagattgcaccactgcaccctagcctggcaacaaagcaagactctgtctcaaaaaaaaaaaaggaaagtaggtatgtttacaatttaaaatctttgggcatggagataagctataaggccattgatcagaatggaccatttcataatgttccaaaaattagactactttggaaaaaggtggtgtgtggtcttaatgtaggcaatgcacatgtgtgtttaagtttcaaatacagctaaggagctaagtggaattttttttttttttttttaccaaatagcgtgtattaataatagctcagttccatttactgatttgtttttcctttgtttatgtcatatattatctttccaagagattgtgagtttatgctactgccaatttggtatgagggcctgtttttaaaagagctgcatgatattcacttggatgtaccacgatttattcaaccagtcttttctttgtcattagacatttagtttatttaaagcctttcaacattataagtaactgtgaaagatatctttgtgctatgagttgcctacattttggatcattgccactaagaaagaaattaactagtgactcaattattccttgctttttttgagcaaaaatcatattamaaataattagatttaaaatttttggttaaattatactttaaagcaaagatccttgccatttagatctagtttggtattaaatgagaacggtggttctctactgtgttggtgggggatatgttcatgatggattttgctgtggaaggacatttggcaatgcctggagagagttttggttgttacagatgcagggaggggtgccactgacatctaatgggtagaggccagggatgctgctgctaaacatcctgcaatacacaagacagtccccacttgcccccccccccaaaaaaaattagctagcctaaaatgtcagtagtgctgaggctgagaaaccttggattaacaggtttcactgctgatgggaaacttttttttttttaacagggccttactctgttgcccaggctagagtgcagtagcaggatgctagctcactgcagtcttgaactcctgagttcaagcaatcctcctgtctctgcctcccaagaagctggaactacacatgcacaccaccatccccagctaattaaaaaaattttttggcagagctggtgtcttactgtgttgcccaggctggtctcaaactcctaccctcaagtgatccttccagctgggcctcccaaagcaccaggattgcaggtgtgagccactgtgcccagaggaaacattcggaatctgtgatagaaggggaargttttagctccagaacacaagtagagctggctttgccttatgtgatagacctagtgaatagctcagctgtctgctttcctaatgccatttagacagatactgtatattttattgcttatgcaatgtgcttataaaattgtttatttttgtgtcttgggtattcctgaaaatgcctcatcagtgtcagatctagttgctgktgagatttggttttgctgcgtatattagttacagacctgatttagctacatgggaaagaaaattaatcaatagctgatttaacaaccaggagtttatgtttctcatgtgatatgaattctggagagagacttaagggctgttactgtggcttcttgatgtcacccatgactcaatgctggtatttctgcttacctttcttaggaatgtgcattttaccttgctgtcacaggatggctcctgcctgttcccacccctcacccccggcagcaaaacctatgttccaggcaggcagcagtgaggacaaaggtacctggagccagtcctctttgtcagcgttttcctgcagcccaacccagtggtttctgcttattcccattggccagactgtcacaggaccttagaggctgggacaaatagttttcagctgggctcattgtggtctgaaaacaaaagcagttacctttagtaagaaagaaaggatattggggctgggtgcagtggctcacgcctgtaattccagcactttgggaggctgaggcgggcggatctcttaaggtcaggaattcaagaccagcctggccaacatagtgaaactccgtccctactagaaatacaaaaattagccaggcatggtggcgcatgcctgtaatcccagctactcaagaggctgagacaggagaatctcttgaacccgggaggtggaggttgcagtgagctgagattgcaccactgcactccagcctgggcaacagagtaagactctgcctcaaaaaacaaaaaaaaaaaaagaaagagaaagaggatattggaataaacagctaatatgcacctttgggagctgctttttgaaatattggttcttgtaagttcactgaaattttttttataaagtagaacaatattggagatttgaaagaatggactcaatgcaagagatcttattagctgagaaaatgtatttatgttatgaatgtatttcttaaccccaagaacttggctgttgtattgtgttttgtaaattttaaatctccctactactatactgggggccttaccctcttttgtatagtgcacacaaagaagtgtgtttctctgggctaaaaatagaaatctgcacctgacagatggccttaagtgtggaaaatgggtgtgtgtgtatcacagaagtggaagaagtggagggagtcctgctctgcctgttgttttaagcctcccctccctgcaaatctatatctttcctatacactagtaatggtcaataggtttttgttgttgttgttgttttaatcccatttacagtagcgacaaaacttatcaggtatctaagaataaacctttattatacatttatgctaacctttagcatacctttatgaagaaaactacaaaattaattaaaatatcatgaacggcaatgcaaatggggagaataaataggggacaacttgccttccagatgcattgattacaaagctgtagtaactaaaatttgatactgtctcaagggcaagcaaatgcttctgtgaagtagaatgaggatctagaaacagactcctgcgtgtgctgaaacttggtttatgatagagcaggtgttactgataaatgcagaaaccaataaatggtattaagtcaattaactttccatttggaagggataaaattaaatttctcttccacgtgcaggctaataacagtgtcttatatcttgcaaaagtacttaccagtccattcacttccagaaaaatggagaagtttcrtattagaaatttgtgcatcatgtttcataaataaaaacttcagatactcggctgatggtgttggctcaaacctgtaatcctagcactttgggaggctgaggcaggtagatgacttgagcccaggtgttcgagaacagcctgggcaaaaagtgagaccctatgtctataaaaacaaataaacaaaatggcacctaacttttaaaatgctttttcttacatgtaataatgtgagcaaaagcataatttaatttttsctattaaaatgctttttttttggtttctgttacatttctgtatttacttgaattcttagaacactgtttcctgggagatcaaacctggccattctggatacatcagtagtgagagcttagtgcggacatagccttacagaatgtcttctatgttgaaatgcagagaacccgaaggcgcctaggatgagcctcaggcctgctggttgttgcagtggcgcaatctcagctcactgcagcctccgcctcctgggtttaagcgattctcatgcctcagcctcctgagtagctgggattacaggcgctcgtcaccaggcttggctaatttttgttttgttttgctttttccgcctcactctgtcacccaggctagagtacagtggtacgacctcggctcactgcaacctcagccacccggtttcaagcgattctcctgcctcagcctcccgagtagctgggattacaggtgcctgccatcgcgcctggctaatttttgtagtttcagtagagacgaggtttcaccatcctggccaggctggtcttgaactcctgacctcgtgatccacccacctcggcctcccaaagtgctgggattacaggcatgagccaccgcgcacagcctaatttttgtatttttttggggttttttttgatagagtctcactctgtcgcccagactggagtgcaatggcacgatcttggctcactgtaacctccacctcccgggttcaagcaattcttctgcctcagcctcccgagtagctgggattacaggcacccatcaccacgcctagctgattttttgtatatttagtagagacggggtttcgctttgttggccaggttggtctcaaactcctgacctcaggtgattccccgcctcggcctcccaaagcgctggtattacaggtgtgagccaccacacctggccaaatttttgtatttttaatagagctgggttttcacaatgttggccaggctcgtctcaaactcctgacctcagggaatccgcctgcctcggcctcccaaagtgttgggattacaggcgttagccactgcgccaggcttgttgctgaacatttatggctctagaaataattttttttttaaggagaagtaatgacaaacrtgatagaaataaaatttgaggatatttctgggttcaaaataaagtaacagttaaatagcgtgaacatgaagaaataaatattttcaggtagaaactccaaaatttaggtagatgctgtgagttttagtcagaatttgaatatgatgtggctgaccatagatacctccattgcattaattctgcttcataaagtgtttgatgcttgcttgtaggtgttgaatagagcctaattagcagtaagtaaacagatctagagcacagactttggcatctgaaggaccttggttcaatgctgggactgccacttactagctatgggatctttggtggatttttaacctttgaaagcctttcatccctcacagatataatggggaagaaaatcgtttccattagtattgtgaggattaaatgattaattgatgtaaacaatgtgctttccatagtacttggcatatcataagtgcttcatgttattttacgctggctgggaagataagttttgctgtggagaatttaagagggatattaaaatatatttttgttattttaaggaaattcgaaatgagtcccatgactatcctcatagagtggccaagtttccagaaaacagaaatcgaaacagatacagagatgtaagcccatgtaagtacttgtgggtttgtgtgcatgtgtattttttggtttgttttaggaggcaggatgtagtgaaaaggagggcttggggtcagtgttgataaatacagtaatttttttcctatttacgtaagacacgttctttaagaatttaaaggtgtagaatagtggaaggaaaaataattacccataattatttcatccttcaaacataggcaccattattttggtgtatttcccacaacctgtttttcttatgcacagttttcctttctttaaaataattgtaattatagatgtctatataatatccatatgtatttccttttcatatcattccatcscctttgtaagttttgcttaaaatagttattggtgtagtttggtttttttccttccccaagttataagagtagtatgtactcgctgtagaaaacttagaaaacagagaagagtataaggaacaaacttatttaaaaataaataataacttgggtttatattctttggagtttttaaaaataaacatgtaytttaaacggaaaattagaatcttgccacrtactcatttgtagctcttttcttagcagtacattgtaaacttttttttattataaacacaatttttaattgctttgacagtggctttggatataccactcttttgcataagttccctgttgttggacatttagattatgatgtatacacacacagacgcacacaattgtgtgaacaattataatactagagttctttggtgtattcatcatcatgcggtgattttattttttgttctgattcatgcagcttattcagatattaaattgggcctccttcgtgcttcagcatrtttccctatgtttgactttagtgggctaaacataggttttctctttagggctccctgttggtagggacttgaaaaacagtatcagattgatcacattctggtttttgcttgttactgattgttcgcctgttgactagggtatggtgctgcctgctaagatctcctgtgtaggttgaaccatttcactgttcaaggacacagactgtatacctttatatacattgtagtcattggttatagataagatatttagggtctggatgtaccactgaaaaatccatcagttactggaaaaaaatccttatttttattcttacatgaatagaatgtttttcttatgttgaccaaatacatttccaagaagggtgtattggctgattttgggcaaatcaaatgagaagcagtctctgaaaatctttcatgtttgttataaattactattaaatactatgtttctcttaatgcttttttctttactaccagttagaagtgttcttaaagacaagtagctagaagagtggttttccattttcttcagttgcagcacacttgaagatttracccacttcctctgaaacaggtggctcatcacggtggcagttccagtgtgggtgtgcgttcagggaatagcgggtgtgggcagtaattctgatacttaggtgcccttcccctgcctccaaatctctgattgagaatcactgagctacagagaataattctctaatgttaccatgagttttgaagacagtattttccagttgtacaccttgctttgatgcctttaattttttaaaaacttttgattttgaaaattgtagatttggatgcagttgagaaataatacagaaagatcgagtatacccctcacctagtttcccccagtggtaacatcttgcataactacagtccaatatcacacctgggaacctgaaacaatacagtccatccaggtttcaccagttttacatgcactcatttgtgtgtgygtgtaagttctgtgcagttttatcacgtgtagattcctggaatcaccaccacagtctagatgcaaaccagtggagcattcccatcacagggtcacttgcactgcctttctggggccacagtctccttgcttggatcctccttccctaacctggtgttgcctttaatttttatatatttgttgtaattgcaattattggatgcactacactacatttgagtcccctaattagttttatcgaattgatctaaatgggattttttttttttttttttttgagatggtgtctcactctgttacccaggctggagtgcagtggcgtgatcttggcttamtgcaaacccctgcctcctggattcaagcgattctcctgcctcagcctcccaagtagctgggattacaggtgtgcaccaccatgcccggcttatktttgtatttttagtagagatggagttgcaccatgttggccaggctggtcttgaactccttacctcaagtgatccgcctgcttcagtctcccaaagtgctgggattacagtcatgagccaccatgcccagctgataattttattttaactggaattgagatgttttattttaaagtaaaaacatttgcaacttaagttatcctcaagtatatacatcaataaaacttatgatttttctcctcagcttttagacttatgttgtatacctgcagttgaaggctgcagggagactctttaaaatatgcgttatcaggcctccctccatcatcattgggaccaggctcttcctgtatgccttctcattgaaaagcacttagccttgagagaaccaagcttccctcctgcggaccatgcagtggttgtcctctggagctgtgctctgctgggagcagcccccagtgcatgttctccttactcttcttcttctttgccccctccctccccacacatgcctccctagtaagccatgttctcctgatctctcagaaagagactgctcattcttgcttctcacgtagccacaggattttctagtctgagccaatatgcttcagcctgcaaatggaaatgatctcttccaaggcttgtgctggccagcacatccccacaccgccttggcacctctcctctcctgacttcagtcattcactgtctttctccttaccctctccttcccaccttcctcatcctgggtgacttcatgtctctgggaaagaactacggctcattgcgctagagttcctagacctgttcagctccgctgacattgacctttagtcatcttcacctctgaaatctgaaactctgctgccttgagggctactttctgtcattccagctttcacttgcttactcccactgtacctgctctttgacttcagcaggatctttagttgactttttcatgtattgtgaagttggaaatgtattgaattgaaatttcgattaaaaaatgtagtgaagcatattactttgtcctctaacytaactattaataactttcttgttgtttttatatttaaaaaataactctggattttttaattccaccattttgtgaagctccaacttaggaaaaatcagtcattcatcctctctgcactttgggcaaatgagcgtgtgccttgggtggactccagtgttaggtgggcttggggttgccttgctgtcctcatgccctcgtctgccccactgccaccstgytccagctctgcaccgagtaaatyatctctcagagctcctcaccatgctcaggatatcgtcctgctttcaattctacagataaaaattgtaaaaatcaggaaacaccaccttagcttcatgttctatcacctggaaactcactttcttttgcccctatccttccctaaagtcccaggagagaagcctcccctccctctgtcctagcygaatccttcgtccccatcctcctcatgggccctgctcttcatcatcactgctttttgtgtgttttcagcctctttctatctcataacttcttctcttttgtataaatatggttcgctctcttttgtctcaacccttatatcctaccccagcccccacttcctttcttacctacatggatggacatttcttacctgtacacaggcttaaaagaatcaatgtgccatttgtctctccaccctccccaccatgcacacttcagcccatgcttcttctccagcctccccactgaaacttattctaaaagcactgtagctgtagttgtcaaatgcaatgagagactttccactggtttccttctctgtgacttttgacattattctcctgcttcagcctcccgagtagctgggattacaggcacgagccatgacgcctggctaatttttgtaattttagtagaaacagggtttcaccatgttggctgggctggtctcgaactcctgatctcaagtgattggcccacctcggcctctcaaagtactaggattacaagtgtgagccactgtgcccagccgaccgtgccttttttcctaaccccgtaatttttctgattttcctctttggcccctcccctattttcagggtgtctcctcctcactttgcctttatttcttcaggagtctgtttctctctccttctcactgtaacacttggatgaatgatctcatctgctgtgggcctagtttccatctctgcttataaccccaaatctcatctgcagtcgtggacttttctgtctacaggtctgtgtatccaagtcatcatctctgtctgggtgtcctgtagccacctcagactcagtatacactgagtgagtgttcctccctgacacacttcactggccttagccccacacctgccttttctccttttccccatgtttataagtggtgccgttatttacacattttctgaagccagaaacagattcttccctcattcatttcccacgwcactaatactaatttccatttccatgatgtattcctatttctttttcttttttctttttttttttttttttcaagacagggtctggctctgtcactcaggctggagtgcagtggcaccgtctcggctcactgcaacctccgcctcccaggctcaggtgatcctcccacctcagcctcctgagtagctgggactacaggtgcatgccaccatgctgagctagttttttagattttttgtagagatggggtttcgtcatgttgcccaggctggtctcaaactcctggactcatgtagtccacctgcctcgacctcctgatgtgttgggattacaggtgtgaggcaccgtgctcagcctccrtaatgtatttcaaatctgttttcttctctgttcacattggcttggttcaggccctactacgcttttcctcgtcattacagtagcctccaaacccatctccttgtttcccttctgttcccacttcagtccattttcatggtatctggagtaatctttgtataatgcaagtgtgttttccactctcctctctaatagtgctgcacaatttttatgaaaaagttaaacttctttagcattatcatactgggctttttggagattgacccctttacacacctctctaaatcttttctacccattttcctagaaattattcatttcagtaaaactgaatcacttggagttcttctagcgtgactggtttttaatacctcagtggcttcaaatatgtcattccctttttgaaatattcttcccctcctctctctgacccatctcaatcaaagttctccttctgcaaataccagctcaacaacctctttcccgtgagtggtattctcatccagtggaggtggtggttctcgttcactaagtccagaggggctcaggaatgtgtattttttaaaagctgggatggtgttgctgtaccttttccaactgatagtcattatgtmatttaaaaatgtgtttctggctgggtgctgtggctcatgcttataatcccaacactttggaaagctgaggtaggaggattgcttaaggccaggagtttgagaccagcctgggcaacatctctacacagaacttttttttaattagctgggacgtggtgatgcatgcctgtagtcccagctatttgggaggctggggcaggaggatcacttgagaccactaattcaaagctgcagtgagttgcaatggcaccagtgcactccagcttgggtgacagagcaagactgtctctaaaaaattttttaaatgcatttctatacatagtacttgacagttgctgatttggttcagaaaacatttgttgaaaaccagctacatgtttgatactatgctatgtatcgaataatttatggtatacttgaggagattaacacataagcatgttacagatattgtaagatatgacagtgcattgatggagctgagaagaggctctgcccaaggaggcagggatggcttttaagaaaaagaatggtagcctgaactaggtaaataaaggggaatggaaaaagaattttttaaaaattcagagtcccagatctttcttttctagatttggattcagccggtctggaaatgtttatttttaaacaatcttaacatgattcttttacactcactatggcaccactcctcagactgacatatggaaactacatttggagttctgaatacgagaaacataaaggaaaaaggatattttaaattaggaagaatttgggctgggtgcagcagctcatgattgtagtcccaacgctttgggaggccgaggagggaggatcgcttgagcccaggaatttgagactacagtgagctgtgattgtgccactgcactccagcctgagcaatgtgagaccttgtctcaaaaaaggaagaaaattgaaaggatttgaagaggtccataatctgctacaacctagagatgcctcagttgtctcagttaactgtgagacattgtagaagagatggacaagaacttcgttgtttgaaaagagagtagcttgtaatggttactttgggaaacgtctttatactattagagactrccaccaaattttgagatcttcctatttgcagtacaggtagaaatcccagtttactatttggtctaaaagggagtgccagcaattgagtcaactgtcatgtcttttcactggccatgaaacaatctgtgtgtgtgtgtgtgtgtgtgtgtgtgtgtgtgtgtgtgtgtgtgtgtgttaaaaacccataccataaatttcttgtaggtgtatattaacagtattgttaactgtatgcacattgttgtacaatagatttctggaacttttccatcttgtataactgaaactctaaatccattgaaaaactccctatcttcctcttcccccagcccctggcagccagcattctgctttctgtttctatgagtttgattactttagacactaaatatatgtgtaatcatgcagtatktgtctttctgcgactggtttatttcatttgacatactgtcttcaaggttcatccatgtgaaacagtcagattttaaaggaaattaacacagagactcatgattctggtagtgtcaggttacatagtccatggtttgttgctctacaaaacaaaaagattctcaaataaacatactttttaaatgagttactagagggggaagaaggaagggaaaacttctatgctttcggcacgctccctgcatgatcttagcaaatggcataactactttgaatgcagatgtcagtatcagctctgagatttgtatgcagctaataaagtagccccaagatgtattaagcaaaaatgaatagaattttggggagaaattgacaaatccatgttcatgggcttcttaataagacaagatatttgtaaagaaatagatttatataatattattaaccttaatataagaagaaaaatacatagaaccctatatccagcaattagaaaatgcacatttttctaggactgacatggtctatttgtaaaaaatggaccattgactaggctgtcaagtaaatcttaaaatttaagaatgcctggctgggcgctgtggctcacgcctgtaatcccagcactttgggaggcctaggtgggtggatcacctgaggtcgggagtttgagaccagcctgaccaacatggagaaacctcgtctctactaaaaatacaaagattagccaggcatagtggtgcatgcctgtaatctcagctactcaggaggctgaggcaggagaattgcttgaatccgggaggcagaggttgcggtgagccaagattgtgccactgcactccagcctgggcaacgagagcgaaactctgtctcaaaaaaaaaaaattcctatcttatagctcataattttttatcttaatgcaattaaaatataggttattaataaaaagataaacatttccataaatttggaagttttaacatttctaaatcgtgggtcaagacaaaattataatggaaacttaaaaataaacaatatataaaatactgcttatcaaaacttgtgtaaaggagctaaaacagtactgcaatgaaaatatattgtcttaaatatttatattatattttatttattattttttagatggagtcttgctctgttgcctaggctggagtgcaggggtgtgatctcagctcactgcagcctctgcctctcgagttcaagcaattctcctgcctcagcccctcgagtagctgggagtacaggcacgtgccaccaggcctggctaattttktkttttttagtagagacagtttcactgtgttggccaggctggtctcaaactcctgaccttaagtgatctgcctgcctcggccttccaaagtgctaggattacaggcatgagccactgtgcctrgcccagtattttaagatgaaagttaaaattaatgtgctgtctaacctaatttagagtaaaaataagagaatgagaaaaaaaaagcagaaagaagtaacaacaacaaaggagcagaaatagaaatcacagttacagcacaagggaccaactaaactaaatgttagcctcggtaagactgatcaactctgtcaagatcgagcacgatcaatcaaacaagaaagaaagaaggtgcatataaacaatatcaggagaaagagtgggcacataaatacaggtatacaaagaaagcgtgaattgaatactgccaacaattttatggcagtaaatatgattttttagaaaaaatggaacagattcctagaaaaacataatttaccaaaactgactcaagcagaagtagagtctgaagagtccacttaaagacattaataaacaaaatccacaaagaaaacactgggccagctggttttaccggtatgtttcataataatgcaagtgaatatagatgtagaaatcctaacaaaggattagcaaactgaatatagcaatgtattaaaaagataatacattatgttcacattaagtttatttcaggaatgtaagggtagctaacattagaataccttttttattttttatttatttatttattttttgagacagggtttcgctcttgttgcttaggctggagtgcggtggcacgatcttggctcactgcaacctccacctcccgggttcaagcaattctcctgcctcagcctcccaagtagtttgtattacaggcgttagccgccatgtctggctaatttttgtattttcagtagagatggggtttcaccatgtttgtcaggctggtctcgagctcctgacctcaggtgatccatctgcctcggcctcccaaagtgctgggattacaggcgtgagcttctgcacccggcctagattattttataattcaccacagtaacaaaggagaaagagccatatgattatctcaataagtgtggaaagattatttaaagtccttgctgaggattaaaaatgacacatagcaagctagaaatagaagggaacttctaagatttctaagagataactgcaacaacatcactcataatgatgacatgatgaaagcattgttttaaaaaaatatygggaacaaggtaagtgtgttcattcttaccacttatacttaacattatacttctgtctccctgaccttatactctaggtcctagttagtacagtaagcaagaatgagaaataaaagccataaggattggaaagaaataaattaactgtcttttaatctgtttatgaggccactatagaactttcatagccaaagcaggaaggttcagtaagaggaataaaagtataaaagttttatctgttgctatataacaaaccaccccaaaacagtggcttaaaacaataggagacatttattatgttcacaaatctaggggttgactaaccccacataggtgattcttgctcaaggtcttttgtgtaattgcatttcaaatgggggctggggctggagtcaccttgaagaagcaacttctttactcttgttgactgtgacctcaactgggctgtcaccaggaacacctacacaaggcatctctatgagacctggactttatcacaaggcaactgagtttcaagagtgagcattcttagagagcaaggcagaagcttcattgccttttgtgacctagccttagaagtcacatacaacttccacaacattccgtttgagaagtaactcactaaggccatgcatgttcaaggagagggtacttaatactcttattagtttgatggaggaagtatcagtgaattgtggacatattttaaaascatcaccactatagatgatacgaattgcttcgtagataacccctctagaaatgtgcagacaagtcaaagaattattaagaaacattttgatagtcttagaattataagatgatagaccttcaaatcattaaaaagaaacctttaaacttaccagaaagtgcttgtcatctttcttagtaatagcagatttagataaaaacttagttctataataataatccgaataagtatagatttaagttaaattttatggtaactattatgtaaatatttgctaacattttttcttatcccattaaagtttgaaaataaagaccagatgtcagtgtagtgctttaccttctcaaaatccgttgttgacagcttttttactaaaagattttctcactcactgttagggtctttagttctatcttcaattttttttttttttttttaaatattcagtttkggcctagtgcagtggcttatgcctgtaatcccagcactttaggaggcagaggtgggtggatcacctgaggtcaacatggtgaaaccccgtctctactaaaaatacaaaattagttgggcgtggtggctggcatctgtaatcccagctacttgggaggctgaggcaggagaattgtttgaacctgggaggtggaggtgacagtgagccgagattgcgccattgcattccmgcctgggcaacaagagcgaaaaaaaactccctctcaaaaaaaaaaaaaaaaatctttaattttaatcaaagccaaatcaaagctatttatgatgttaataatttattcctgcgggctattgatgcactggagtggttccaaggaagaagaactagaactcttagagaagaagctagcattgattagacagggaaagagaaaacctaaacagagcagcatgatagctgactttagatacctgaacttttacatggaaaaaagagttctttatcctgtgttaagcccaaaatatagaactagggttcatgagcgaataatagcactggtgaatatcaggttrgcattagctcttaagagctgttttaaacctacaaacgaaccctctgaactagtacacttgttattggaggtattcacgcagagggtggatcttctcactgtcagatcttctagagaatatttgtgaatgaattatagagggttgcattagattactttggtctatttcttgtatgcttcatttcttgcccctrttcatctctttctcaccaatttcccgcattcacctttctgtcctattacattgtgaattccttaacagatgaaacttttttttttttttggactgacaaaaatcttgtacatagttttgtcatagggtagtaaagagagtattaaagatatcattaagtttctctttctctgtccctgaataattaaatctataaagcacttggggttgggcccacatgtggaaggcatgtgagtaaaggtggtaatgtccttgaaaaagaagcctgtaatattgggttagcattgctgtatccaggtatgaatgcatggttttcagtgagtatagatacacagataaatatgaacataggtatgtgtatatacctatatttcttatccctgtccactgggaaatcttgagagcagcgatagctgatgagccattgggcatgcttagcttttgataccaaattttattctccactaggaggagaatagagctttggagaaatggctggttccacgtctgcgacagggaaagtgtaagaatagcctggaatgtcttgtagtgacagaacataaagacatgcccaaaaaatgatgaagacatatcagaaggatgtagaagccaagctgagtccactggccaaacctgggataatctgagcatgaaaataaataatggttacaacctattgaataaaataggaattaatgtgtctatactgatgtaaagaaacaaatgaatacataaatgagggatagggaaagttctacctttgtataggttgccaactaataaatattgaaatggatactaaagttggtgggtgaaaatttggtgaagaacaaggtatttacataatcttgaagtatccctttacaaaatacttattaaatataagaagaggaatagtacctctacactggagaagtctggccaacaccagccttaaatatgtggtcatgaccagtcatgagatataccatgtcagaatcctgaaccacccgataagatgcagtgaatacttagcatctttctgagatgaacatgccaaaaatatacaaactgaactcatctatagggaaatagatatctgacaactcaaatggaggaacactataaaacaactgacttacagtttcaaaaggttaaaaaataccgtgaaagaacagattgtatccttttgtttaaaggacattattgggacagttggtagaacttgaatggtgtctgggttagtaaagtatcactgttaattttataatttcgatggctatactatgagtaagtaggattatgtcattgtagaagataaaaaaatggaataatcaggtatgtttgcaacttgctgtcatgacttgggaagaaaattctttgtgcttggaatttttctgtaagttttaaaattatttaaacatacaaattaaaaatacatataaacttgaggtactgaatcctagccagtacatgaagtcaagaaaaggaaataaaaggcatacaggttggaagggaagaaataaaaatgaccttattagcagatgacatgtagaagattgcaaagaatctacccaacaatgtcctagaactaataagtgagttaaacgaggttgtgggatacaaggtcagcatacagaagccaattgtattcctgtatattaacaacaaacacgtggaaaccaagattaaaaacacattgttgtttacagttgctctaagaaaatggaatatgttggaataaatctaacaaaatacatataggatctgtatgttgaaagcaccaaacacatggataaaagaaatcaaaagatgacctaaataaatgaaaaaggcctaccatgttcatggattggaagacttagcatagtgaatcagtcctccccaaattgttctatagatctatagtgactcatagtgtcaaattgttcctaaagatctaacacaatttctgtcagaatttcaggaagtttttttgtagataaaaacaagcttattcttttatgtggaaaggcaaaggaactaaaataaaatggctaaaatgatcttggaaaataaaaactagaagaatcactctacctagttttaaaacttaatgcataaccacagtaatcaaaacagtgtggtagtggcagagggataaatacataagtcagtggaacataatctagaaatagacttgtaaaaatatggtgaactgattttttgacaaaggtgcaaagcaatttaaaatgaaatctcacaccttacacaaaagttaactgaagatagatcatagatggatcataatgtaaaagctttcataagaaaatgggagaaaattcaggatgtaaggctagatgaagagttcttagctatgacacctagagcacaattcatttaaaatatcaataatttatactaaatcgaaataaaaaacttctgctcctcaaaacaccctgttaagaggacaaaaagatgagtacagacttggagaaaatgtaaaccacatatctgacaaagaacttagatctggactatatatagaactctcaaaatgtaacagtaaaaagaaacaaaaaccccagttaggaaatgggcaaaagatatgacacagatggcagataagcctatgaacatataaaaaacttcattagccattaggaaaatgcaaattaaaatcatggtggtgggatgtcactagacgcctactaaaacagctaaagtaaagagatcacaataccctaaaaatgcagagaagctggatctcatatatgggtggtgggaatgtaaactggtatagccactctggaaaatagtttggcagtttcttaaaaagctgaacgtatacttagcttatatgacccagcacttgcactcctgggcatttatcccagagaaatgcagtcataatgtccacacaaaagtgtgtgcatgaatattcacagcagctttatctgtagtagccccagattcgaaacaacccacatgtccttcagtgggtaagtggttaactatggtatattcataacacagaatactactcagcaataaaaaggaagaaacttgacgtaacaacatgggtagctctcagaggacttacgctgggtgaaaacaatccagtttccaatgatgacatagtacatgattccatttatataacattcttgaaatgatgagaattctcgagagggagagcagatcggtggttaggggtggaatggggaagagtgtgcctgccaaggggcacacagaacctttgtgctgatggaataggtatgtgttgttttggtcatgtgaatttgtttgtggtaaaatggcatagaactgagcacacacaaatgagtgcctgtagaactggagaaatcaaaataaggtctgtggattgtagcagtgtcttttcatgcttctgagtttgatggccttctggaactaggccctggacagcgcattgctaggagtggggctctgtggtgagtctgacagcgtccctggctgcaaagagcttaactgtggcaagaaggctgctactgggtgcctgggtgctcctgctgccctccaccagcggagctgatcagaatcttgccctaagaggcccctcttaaaagccacagcaccttgggtgggctggtctgccctagagcacttacgctgggtggagggagctgtggaagcgtgcagtgggggagtgctggagtccaggacagtcagctgtactcgggattggggtgagggtgtggttgtttctagattaaaatacagatacatgatcaagtagaattctgaaattcctttaaatgtttaaggtaaaataggaattaccaaggaattttgtactttaataccctcttarggtattaaggagggtttgtcagtgaaaataatcaagaaggactggtccattygagccactgatwttgacagacaagaaaacagacccctgagtgccccttatcataggactgtcggcgactgggatgctgatagtgtttctcaagtagtagtcacccttttctgggaaatcatgactacgtctggaatcrtgtaggttggtagagccaaaagagagatcagaatccacatctttagatccctcaaactcccctcacccatgtttttcatctgcgtcgcaaaattccaggtacctgtactaagaagtcctgaaggtttctgcgcttttcctttctgccgaattagtttacgcttaagaaagtcagttaacgtcatttcatttcctgcttatggttcagaatgggttgatagtgatttgtcattctaacaaaattctagcaggtgtaggaatttgaatatgtgaaaatcttctggaattcatcatataaacaatgtttgaatacttgctgacttaaattgttatgacactctactaggtaggcccgctgagaaaatggaagtagcagtcctttttccctgacagtcaaatttaggagaaatgaatcagtacaggatttcttgactctccgaacctaaactgcagactkctcctctccgctttgtccccgtggctccagccacattcttcatgtccctcagacatgttaggtatgtaccaccttaagtcattcgccgttctctgtgcttggaacactgttaastaaaatatccgtgagactgaccccttccacatctgtgcttacatgtgacccacctgggtggtcagccacaaggcccatcctgaccamcctgtttagaattgcaacctgcccctctccccagcgctgtgagtcccgttactcttttttcttagcatttattactcatatactttacttagttatgcttattgctatatcaccaatatagatatttggtccgcattgtttgcatggtgtctcatgggcctttggatgtgatgaaagttaaatcttttcccctaagtccctccaccttcaatttgtttaggctctaactctcctagaagcggagagtctgagtttcaaagaaaatggtgcaatactgctgagcgccgtggctcactcctgtaatcccaacactttgggaggccgaggcaggtggatcacctgaggtcgagagttcaagaccagcctgaccaacatggagaaaccccgtctctgctaaaaatacaaaattagctgggcgtggtggcacatgcctgtaatcccagctactcaggaggctgaggcaggagaattgcttgaacccaggaggtggaggttgtggtgaactgagatcgcaccattgcactccagcctgggcaacaagagcgaaactccatctcaaaaaaaaaaaaaatggtgagatacttactgattattttaaagtgaagattagtatgtcttattttatacaagctaccaaagaggaaaaatgtctgttttccaaactaatgaattttacctattttgtaaagacatttctcaggtattcttttcattgcagactcttggggacagattaaagaggactttttcaattaggagatttgtggaatcagaatttaattagtgacattgtcctgtcaagtttaggatcttgaaatcatgatgggttgaaagacgctgatgatttcaaggacagtaaactattgtttggaaaaggttgaacttaccaaatgtttcctaaacaatgtatactttattagcaaagctgtgatggtgctaccttggaaatactctttacattcccaccgccactacttgattcaggcctcatcaccttttgattacgctttcagtgtattggtgtatgaagttgccttcttcttggttcagtccatcttctatgctgctgagasttattttcatgaaaatcaaatgtgtttataccagtcctttaaagaacttcactggggccctgtccagagcctgtgcctgtagcacggcccacgtgcccttcagggtccgcccttaatgtgtctggggagccctctctagccagctcgccagcctttctgaatctgccagtcctgccgctacaccattccctttcattcctctttatgatgtgccctctgctggaatttcyccttcctgctgatctcactaggcctattcaggtagcaactactcaagctccttcccacaatattttatgcaataaagtatcagtactcagagtcacggcttaatataatttcttttttcctttttaaaagcttcaaacaaataatgtcttacctttagatccctataggttaaaatatgtttgttgactaaaaattgtgtatgattgctgaaagtattcaatgcagggaacagaccagttcatcatggaggcattccatcagagcgtctagttagagaagatatgtcatggactgcatcggcacagaagtggggtttatgtgagagaggagttggaagtcacacctgagtggagagcaacgtgaaaaggtgatgtcagcaagaatttaggatgtatggaaaggatggtaaaggcaccaactggatggatcagggagacatggaatgcagaatgcaggaaataggtaatctcttaaattgcacaaatctaggtttcatttttgtgctctagtgtgttacacttgtgatgacttgacttccctgagtgacagtgcgatgggtgtgatccatattcatatgcacttcatagggctgtgaggactgagagaggtgacccagtgacgagtgtcacacaaacctgacatgtcgtaggcaccaaatggttctagacagtggttctggttggttttgtggtcaattggaaacctttcatcaagtagaattttctttgcagagcaaacaattgaaatgttaatattctatgtgtactaaagtttgtattctccattaatatgggggagtatatggtgacctggtgtttagtgccagctttgtttttggttcattgctcgatttatgagagagaatgcataatatttgttgttcgactattttacttgcaggattgaagagagttgacaaatctagaaaatgctttgagttcttggacatcactgtttgaaaacgtactgattacccttagttgagaatgggaaaatctaaaggggaaaagtcactggttcacgctgtactattagaattggtcatcttcttgcctgacttgtaagttaaggatgcttgatctttgctgtgatttaacctgttcaggatgaattgtaaccagttacaatgaatacaaattctcctttctgtttgacctggaaaactttccaaaaggagatgtctttacaataatgatatatttggtgaaagctgtgggttgtttttttttttttaaagcttatgatgacagtattgaaagaggaaactaatctgtattgtcagcacagccacagctagcactagtcatttcttgagaggtggagctgtttctcagaaaacatgctgtttgagggtaggaggtgaagggactccttgtcagaaattggcttaattttaatccaagttataaaccacagttctgtttgggtattgcatttcttcatttactcagtgacaagaattaaggcagatgatgcctgtagaaaaaaaagtgtatgttcttgatagttctgctactagtgctagtagaggttgagaaataagatttcctgtgaagtgtggttkggttgcttttgtggtatcccatgcaaaagagtttgaactatcttcatttttctccctttactggatcctttaaaagaggaaagggtgagataaccagacttacaaggatggtaaagtatagtgggctttggggcttacttatacagcccaaaggttatgggatgctgctgttatgataatctcatgtcagaggttcctatggaagaggagaaaggatgtacctttctgtgtgttctcattcagaagtcaaaagtttgttttttaatgattagtttacagatttggggctgactgatagtatctgggcagggaaaagagacctgtgactcaggttgttaagggaacctgtgtatatgctctcacaaactcgaaaccgtgtgttgtgatccttaattggagaagaggtagtgcccttctttgttatcatcactaaagagtataaattataaagtcacagtttctcataaagaggctttgatagtttcacttcctgaaatgtgtatattcacaatcttttgcaatagttattttaaggtgatgtgttttatttttttctctactgcctcttcgaaatcaaaaagttatatatactttttattttatattaatctttttcaatttttgtttttataattttaatgtattttaaatttattttaaagttttatttctcctttttgctttaatatttcttcctttttaaattgtttttcatttttcctttgtatgtgtttttcttaaaagaacagaagaattaaaataatatctagtgatgtaggtatttcagttttgtttttaatcagccttgagaagaaaatacaggctcaaataacatttgtagtcagttctaaatagctatagagttttcccaaggattacctttcttttttagtattatctgataacaaaataaaaaaaaattttcctgagaaaattcaccgttcctttgcttttgttgactctgtatattaatgttaaacaggaagcgaggccactgccaggggctgagccctgcagacccagtgccctgcaggtagtgccctcctccctactgcctcccaggactggatctgggcttttctggtgtgtggttactgtgcttatagagcattgaggtaacacctcgtgcatattttacagatagaaggaaaatagcagtgaattttagttcagagtcctgagggtgaggtatcaaatactctggctgaaggtctttctctaggtttacttcctgcatagctgggcaagggtgtggggtggtgccatgtggggtaaccagattcccagcaccctgtgaggtggaccttcccgggttttatggattcctaccgcatgttagctaaatggctgttttcagttgtgcaatagatatgagtagcctttggttagtgttctttctgtgattacaacatgaggaaatacattcctttggtgtgatattttagtggaactttaattttaaaatcatgtagttttctaaaaccaggctttctttttttggtatgttgtctaggagatatgtggtctttattttaattaagttgctgacctttttactattttacataatataacagttaaagggtgattaaactkttttttaaaaaagtgatttttwaaaaaaagtgcttgttgacatcatctttctgagaacactagtatatgtgatttactataacaagatcttagtttttcctgttggcaaatgacatgtaatatttacagaggtcttgggttcagtccagcagaaacatctcagataaattgatgtgtgaaactaaagccattttacattttctttcatatggagataatataaacagttttttcatttaaaagtaaggagagactggctatttagtatggatttctttgagagggacaacttgtaatagtatgcattctctagagttaaacatcaaacaccatgtttttagttttataattcagtgatatgcatccggcagttgtgtgttgaggattctgagttaattcatgggctttttctcctggtgtcatgcttctcttgctttcccatctaaatgtataaggtcacattttgtatttcacatattkaaattagcataaattctcaatctatgagatttttacttttaaaaactagaaatatctctaaactgttaacagagtctaagtagtgaagtatcttcagtggtcttttaaagaatacagttggaatattccaactgtctttaaatattttcagcatttaacctaaacacagttcagtgctaaaatttatttaaatatagtggaattcttatctgttgagaaatgaagaggttgaaatatagtaacctcggaaatctagtctcatctatttgagaccagttatcgttttgtaggtagaccaatcaattcttaggtaccaagaatctgaatgatccttttacttttaggaaggtaagtactttattcatttaactatgtttactcctggtcgatttttcaagtcacaatggctaatgtgctacaaacagaagtgcttcctttccagcactatagtaataaacaagattgcattttatactccttacaaaaaaagtagagaatagtttaggatttgtctcaactctattatgatgctaattcatttttcttatttcttctgtctttttataaatacctagaatattaatatgaagataaaaacagtaattttgaaatgacagttgtggtttatcattctctattttcagatgatcacagtcgtgttaaactgcaaaatgctgagaatgattatattaatgccagtttagttgacatagaagaggcacaaaggagttacatcttaacacaggcaagtaatacgataccacgcaaatgtctgaaaatgatgtgtttgtgcttgttctgctttaaatcataggtaaaagtatatcttgacttcttttggaaatgaaatggtatttcagtttttttctgacgatgtaatgaattatggacattataaggttttgaagctttgagtatttaagataaaaggcaagttatttttgatattacacgttctgtgaaggaaaattcttaggaaatggcttaggccagttctttggcagattgtgttccttacattatatctgacacagagtgctgcttatgcttcttagtgtcttcttttctcttcccataccctgtggcaaaaccagaggccctggacagctcttctgtagctccccstgcctcgcatatatcttcagagagtacaccaagccctggatggtgtctggtcgtcttcaaggacctgagcgggtgctgagaccaggtgctccagaggcccagccrcaaggccttgtgctccctgtggccttctgcccagttgcctctgagcgcatcagccacacctgtgtgcaagcatgattcttccttccattctgagatagtaggagagatttttgtgtatccacagctactctttattcatcaagtaataaagacttgattatcaacagggctgtctttccccctaaagatttttaaatattcaaaagatataccataatatttgagatttttgaaaacataacttaaatcagaatgacttatttgaaagagaaaaatatttgataagtaaaaagatatgcagattaatgtaactatgagctattatactrcgtcaattcacaggaaactaaaatgcattttttacttgaggtagtacagctcctgcaagtcaaaaagaaaaaaaacagcccatggaaaaaactggcaaaggacataaactcctagttcaaagaatcaaaggtggacactttgcacatgaagaaatgctccattcagtaaccagggaatgggcctttcacctgtcagaaaaggagagatttcaaagtgtataatactcagtgttcaaatactctgaccgaccaagaaagtctacttagagaaatacagtcagacataaagatatatgtgatcggccaggcgcggaggctcacacctgtaatcccagcactttgggaggctgaggcagatggatcacctgagatcaggagtttgagaccagcctggccaacacggtgaaaccccatctctactaaaaatacaaaaattagctgggcatggtggcgggtacctataatcccagctacccaggagtctgaggcaggagaatcgcttgaacccgggaggtggaggtggcagtgaggcaagatagtgccactgcactccagcctgagcgaaagagcaaaactgtccaaaaaaaaaaaaaaaaaaaaagacatatgtgatcatgttcattgcagtcttattttaacgcatcagactcaagcaatctgtaagggactggttaaataagttaatcatacatataccattagtaataatttgtggagcttgggaatagagactttaattttccattttattcctttctgtaatattggaagttttttttatgtgcatttgtattttaaactactatttagagttaaaaattttattttctgtttgaaatacctatagttgacccttgaaccatccagggttgaactgtactagtccacttacaggcaaatttttttcaaccaaaaacgggtcggaaatacggtattcatgggatgtgaaatccatgcatacagagggctgactctttgtatctgcaggttctacagggccaccagtggggcttggacatgtgtggattttggtatactgcagtgggtggggggcaggttgggtcctggagccagtcccttgtgtatattgagggacaactaattacattaaaaaatagagaagaattaccaccctagatcccttatcacaaccctttctccctctgtactgttcttctccattatcacttactggttttttgttctcttcttagttcttaaaaacataggtcttaagattctaaattagcttttttttttttcctccagtctgcactacagccctttaagaccatggttttcaacctttgtaacctaagatagggtagactactgtcatggtacctgtgctggaatcttggtgccagcatttcactgggtattcactcacccagcaaagacttactgagacctactctgtggcaggcattgtttaaataaaacagactttcataaaaaccctattatgaattttatgaattttacattataataggaaataataacagttaaaaattttgtaatggtgtttttacatgctttgtataatttaaaccttaggacaaccctctgtggtaaatagtattacctttattttatacacgaggaatctaaggagatccagagacattaaataactttcttttttttttttttttgagatggagtctcactctgttgcccagcctggagtgcagtgatgcaatctcagctcactacaacctcctcctcccgggttcaagtgattctcgtgcttcagcctcccaagtagctgggattacaggtgctcaccaccactcccagctaatttctgtatttttagtagagacaaggtttcaccatgttgctcaggctggtctcaaactcctggcctcagatgatccacctgtcttggcctcccaaagtgctgggattacaggggtgagccaccgtgcccagcctcctagtaattgtttttgaacttcttgtcgctgtgtgtgtcctgaaggagccctgcccatttaatgcgagaactcagaagcctgtgtctggctttttcttctctcctgaattcctctctatgtttttcaggtctctattggatatttttactggatttcaaagtctgcatgttctctgtcttttttaccaaggtagctgccttcctatttttctcattgggattgagactgtcctcattgtctgccaagttctttctgatcttctattgcccctcgcttttttcagagctctcttcaattacacctgtcctgttgcagcagctttttaaggtctccccttggcaccatccctgtcactctagtggtgtagtcaccaactacatccctccacttctacctcactgatctatttgtcttttcccaaatatgccctaaactttcatgcactttgccttatgcttggagggcctggagtggaccctaactccctcccattcttctgcattccctctctgtattaggacctttttcgaggctcttctgtagtttccttcccagcctttcctgctccctaagacctgatggkttaatttgcccatactcttgtactacttaactgtgtccattagtcatacaagtacttctccttctacctttgcaagctcttaaagagccaagactgcatctcagtctagctcttggccttgcatctagcaggttgtttggaatggaggatacagaaaactagagatgcagtaacccagctcttctgattgtcctttgtagattgttacttcagtcatctttttcttctgagttttatgaattagtatttttttaaaagtcacctccttggtgtattatgtctgttttgcagatgaagaacattggtagcattgctggtaaatggaagagctgagatgtgaatctctgttcctctgatttaaaaacctatggctgggcgtagtggctcaacgcctgtaatcccagcacttggggaggctgaggcaggcagatcacctgaggtcaggagtttgagaccagcctggccaacatggtaaaaccccgtctctactaaaaatacaaaaatcagcctggcatggtggtgcacgcctgtaatcccaactactcaggaggctgagggagggagaattgcttgaatccaggaggcagaggttgcagtgagccgaggtcgtgccatkgcactccagcctgggcaacagagcaagactccagctgtgttcctgtttattatttagtctttagaatcaccagtggaatggcatgggttgtgattgtgtgtatacactaaggagtaacctcactggcaaattgctacatccattttttttttcctaattaaagaaaaaggtattcattttactggggatttcctcattgctgtttttacctttagactgtgttttgttttagaagtagatcaagtaatagaaaaataagttgagtgaggaaaacgccactctcaaatattaggttgtagtttgtcaggatcctcagtagacttctagcatttttacaacttaaccttggtttattcatttaagtaatatttattgagtatctgctacataccaaggagtacaccaggcctaaagatgcttttagtcagctgggcaccatggctgatacctgtaatcccagcactttgggaggctgaggcaggtggatcacttgaggtcaggagttcgagaccaacctggccaacatggtgaaaccctgtctctactaaaaatccaaaatttagccaggtgtggtggcgggtgcctataattccagctccgtgggaggcttaggcaggagaatctcttgaacctgggaagtggaggttgcagtgagctgagatcgtgacactgcactctagcccgggtgacagagacaccatctcaaaaaataaaaaatgcttttagtctagaaccactttaacccccttgttgtatgtgggtctgaagctctgggcagccctagcccccactcctgactctgcccctaactcataccactctgctacattccatgtgagttgaatgcatgttcatagttattttaggtgtagcaaaactacatctcattttaaccttctcatttaaaactcgttaaaatttgtacataggcttttcatctcttattagatcttccttttgccctatgctatcattaaaatgtgaaagcaattggaaatacatgaaatattttgcttttatccccatggcattgttgtaacatggactgttgcccctttttaactctgcccaatactcttccattgaggccgtacatactgtgcatttgtagattaacagtttcattgtggttcaggtactttaatgattcctactttttctagaaatctttttgtagttgacttgagttggttggctggccagtgatggtacagacttttttctcatggattttctatgatgtgtgggaggcacatcctcttggctgtagaagatgaagaggacagaaatttccttggtctaccttctttgcagctagaacatgatcagtcagatactcctactcgtgattttgtctctgatttgcctatagattgtacatgaatactatagccaccttcatatggcagtgccagcaaaagcaaggagatagtagtgacggtatcaagagcagcatcccaggttgactttctttggggcaggaccttgcttgtgtcttaacccttggttcctacccargtttgtctctctagtcctcaactctgaaagccacttgatatcttacacaattccttttttgcctgagaaaataaaagtcagttttgatcatttacaaccaaaaatcctaactaacacagacctgtttttgaaatcaggtagattggaagtcttggtttacttcttataagcccgtccgctgtctgtcttgtaacatcccaggagcagacttaacaaggccttcctggagccttgctctttctgtctgcttccctcatctgctctctctcctctctcttcacagggtccacttcctaacacatgctgccatttctggcttatggtttggcagcagaagaccaaagcagttgtcatgctgaaccgcattgtggagaaagaatcggtgagtaatatttaatatttacaacttagtatactgtatgtgatcattagcatataaagattttcattttggggccaatattcattccttagttttggcctttaattgctaaaggctagcggtcaaagtgtttctgtccggaaaaactcatgtatccttttcctttcttaagtatttttataacaattgcagacctttcatctccaagatagaaatacaatggaataaatatggactagcagtgacatatagatctttggaatccctaggaatccttattgacctattgtcaataagtcctcttccagctttaagatcttgtactgttctacttcagatttcttactttattctacatttcataattgctggtttttaatgatgatgaaaatttcctaatccayttctaattagatgtggcaatgacatgccagaatttccagcagtatcagcatagtcatttacaggggtttttcctgatcttcaatatcatttaaaaattaaggattaggccaggcacggtgcctcaaacctgtaatcccagcactttgggaggccgaggcaggcagatcacttgaggtcaggagtttgagaccagcctggccaacatggtgaaaccccgtctctactaaaaatacaaaattagccaggtgtaatcctagctacttgggaggctgaggcaggagaaccgcttgaacctaggaggtggaggttgcagtgagccgagattgtgccactgcacctcaacctggatgatagaatgagactccatctcaaaacccactgcactgcagcctgggcggtagagtgagactccatctcaaaaaagraaaaaaaaaaaatcaaggattatgacattgtcagtttgagcaccattgtagactacatgatttgcaaattttatttctctcattttggagtataattactgtattaataagataacactgccaccagaatttagaaatcatgtttatggtggttgaacctagatggttaacaagagtcaggtttaattattttggggaagattacttcagaggtggtgggtaatgtgttattcatcaagagacccataatgtctgattattgttctttttatttcattaatagccattattggtcagtgttcagcttcttaattcattatgggttacaaatgatgataatccaattctgtcattacttctcttaaaagcagttttccaaaaaaaagttgattccctattgaggtcatctgttctcaacagatgaccaattaggagtttttctggtggagagtggcaggagaggttgaattattatgggtttggacatactggattaattttactcctttgcagttattttccttatttttgatcaaattaccctgtcattggctagcagcaatgtctttaggttgggtcctgagtcctcttttttttttttttttttggagacagagtctcgcctgttgcccaggctggagtgcagtggcatgatttcagctcactgcagcctccacttcccgggttcaagagattctcccgtctcagcctcccgagcaactgggattacaagcacccaccaccatgcccagctagtttttgtagagatggttttaccatgttggccaggctggtctcaagttcctgacctcaagtgatacgcccacctcggcctcccaaagtgctgggattacaggcgtgagccacctcacccagctctgagtcctttttaacaaacctttaatagtttccttggctgggtgcagtggctcacacctgtaatctcagcactttggggagctgagttgggtggatcgcttgagcccaggagtttgagaccagcctgggcaacatggtgaaactctgtctctacaaaaaatacaaacattagctgggtgtggtggcgcatgcctgtagtcccagctacctggggtactgaggcaggaggatcacttgaggccaggaagtcaaggctacagttagctatggtcgtgccactgcactccagcctggggacagagcgagaccctgtctcaaaaaaaaaaaattttttttgctgtctgtaatgactgcatctcaggctcatctcaaactcttgctgcccagacctggaaccagccatttctctaaggagttttggtttcttttaatgggcagcagtatttcaagatcacagcaaaaataaggatatatattgcaactggactggtcattgtttttagggcttttcagtggacaaaagctaaggaacaatatgcatatgttaagataacatacttcaagagttcataatgatattcccagttcaaatttggaactataagtgttgcttagccccttccatcttacatctgctatttcctttttcataccaagaatcctggttctcaaagatatgagagatgtaaactatcttgtaatgactcatttccttcttcccatatcatatacaatatataaccataatcatgatatcatctgctaccaaaataattactgaaaatggtttacaatttttaatatttttttcattctcttcctggtgtttctgagttgtactttacaaactgtagtctctcccttacatctcttgtagactcttagttctacaagcaagcattatttaatattcatcaacagtctttgctgatgtctctccagtcattctgactaaagctcattctctagtggctcctaaggagggacttgtgagcattatagtctgatttttttacatgtcagtgatggttcatctgctgtcttaatatctgaaagtcagtttggcgggatataaaatccttggctcatgtgctattctttgaacaactttttttttccatttccttctggtattccaccaaagtctaatggacatcttatttcctttataagtctcttgttctttttatctgcactacccmaagaattctttttttctttttcttcagatattattagttttaccaaaaatatgtcttagtaattggccattctgggtcagtttttacaggtacatgatgtgttcttgagagtttgacttcaagtactttttaaaattttttaaatactttttgttaaagaaatatttgttgaattacagtccttagtatttgttctgctcccttgcttgctttaatgttcttctttgggtcttcctattatacgtatgttggattttctttgcctaccttttttatttgtcacgttctctttaatcctgtttatctctttatttctattttacttaaaaaaawtttttttttttctggccaggttggagggcttacacctataatcccagcactttgggaggctgaggcaggagggtcacttgagcccaggaattcaaaaccagcctcgacaacaaagtgagaccctgcctctacaaaaaatacaaaaagtagccaggtgtggtggcacgcacctggagtcccagctggggttgggggattgcttgagcccagaagattgaggctgaagtgagccaagttcaccccagtgcactccagcctgggctactacagagcaagacactgtctcttaaaaaaaaaaaaaattatttatttccctcttaaggcattattattattattatttttttttttttttgagacggagtctcgctctgtcgcccaggctggagtgcagtgctgctatctcgactcactgcaagctccgcctcccaggttcacgccattcttctgcctcagcctcccaaatagctgaggctacaggcgtccaccaccacacccggctaatttgttgtatttttagtagagacggggtttcactgtgttagccaggatggtctcgatctcctgacctcatgatccgcctgcctcagcctcccaaagtgctgggattacaggcgtgagccaccgcgcttggccagcaacatttattttgaagataaaattattgcaagagtttgataattttagaaacataaagtgaatgtcccatgacgttaaaatataggtaatcatgctttaagaatgataaatttatttttattttatgaatatgatacctatggcttttttagtttataagttacaggaacacttaaaaaataccttataagaccggacatggtggctcacgcctgtaatcccagcactttgggaggctgaggttggtggttcacttgaggtcaggagttcaagaccagcctggccaacatggcaaaaccctgtctctactaaaaatacaaaaattagctgggtgtggtggcagacgcctgtaatcccagctgctcagaaggctgaggcaggagaattgcttgaacccaggaggcagaggttgcagtgagccaacatcacgccactgcattccagcctgggcgacagagcaagactccagctcaaaagaaaagaaaagcctatggagacagaaaatggatcagtgcttgcctgtggcttggagtgggaataggacacaaggggatttctgagtctgagagaaatgttctaaaactggcttacagtgatgactgcacacacataaaaaatgctttataaaatttcaatctctacccgccctgctccccgagatggagtcttgctctgtcacccagactggagtgcagtggaatgatcttggctcactgcaacctccacctcctgggttcaagcgattctcctgcctcactctcacaagtagctgggattacaggcgcccgccatcgcgcctagctagtttttgtatttttagtagagacagggtttcaccatattagccaggttggtctcgaactcctgatctcaggtgatcctcccgcctcagcctcccaaattgttgggattacaggcgtgagtcaccgcgcccggctataaaatttcaatcttactaaaatacattaagcgtagaatatagtagtgacttcttagttttgggtacttgaaaaaatatagcatgtatatatctggtttgttttcattttttaactttatggtttcatgatgtctataaactaaaaaaaaatcatatacatatttctaaatttaggttaaatgtgcacagtactggccaacagatgaccaagagatgctgtttaaagaaacaggattcagtgtgaagctcttgtcagaagatgtgaagtcgtattatacagtacatctactacaattagaaaatatcaatgtaagacctttcttgcccgaaattgtggactttatatgatggtttaaagaattattctttattattagatttgaagtttgataagcacatgcatttggataatwcctatagtatctagccataatcacgtgtttttagattgtgtgtctgcatctagtagctttctgaggactctgaagaaacagtagaaactaagaatttcaaagttcagtttgatatttggggattaaaaattaattaatagaaatacatgaggattaatagagagggctttagaatcaggcaaacctggattcagatccagctctgctgcttagtagagctgtactttagacttgttccccaccctcactgatcccttcctcatctgtaaaatggaggttaccacgccttccctccggggctgtcctgaaggtcaaatgaggatgtgtatgcagagcacctgaccttagtaaatgcccagcaagcaatagctcccaggacctgtgactgccaagaatagcaaaatagtcaagaaaataacttacaaagctattgttaagtgattcacaacacaaaaatttgtccctattgagttggaaaaaaaatggtgttttatatatatatgtaacacgcacacatacatacatacatacacacacatgtataaatgtggcatgtggtctcaagaacatttacttgggtgtttgtttggttggttggttggttggttgattggttttttgagacagtcttgctttgccacccaggctggagtacagtggcataatcacagctctcaatgaggcctccaactcctggcctcaagaaatcctcccacttcagcctcctgagtatctgggattacaggcatgagccaccatacctaattttcttatwtttttttaatagagatggggtcttgccttgttatccaggctggtctcaaactcctgagctcaagcgatcctcccaccttggcctcccaaagtgttgagattacagtcatgagccaccatgccaggccttacttgcatttttcttccccagaaacatatgaactgttccttgggccttggttgaggtacatacacatagtgggttatgaacctgctgttgccagggtgatgattgaggcatttctccccctttcgccatttacctcttttgccctctttgtgttgtaatagaataaactagaaaataatgaaatgagagtaattctgagatgctaatagaaactgtgatagcttgaaaataggagaatgtttagyctcatatgactttaggaatgtatgtagtctataagtgaaatactgttttagttaaccattaagtaaattaagtgatcactaacaatacaaaaaaaccttaaagagaagggagatatatacatgctttttagatgtgtggcagtcccttttatggtggatcccttgaaacacttgtgttttttgctgcattgagtaagcacaggtgcatgctctgtgcgtgaggcctaggttctggttttccttctgtccagcttcccgtgacatccgtactaagcttattatacagtctcttgagtcacctaaaaaggctcaaaattacgaatgataatgcttagatttatttatacattcccattactatatttattttgtcccaactctttccatttacatgtgtcttaaactgcattgagatacatcaataactctttgatactggactgagctgtacattgttcattcccagaaacagaactgtatttccacaaggttctgaaagttctctgaatcatcttctcttggtatttatcccaggtaattactcatttgcttatggcattaaaattgatttagatgaagggcatagatgtgtttccctgtttctgaaacagtccttattgagaattgattataccttaagtaacaataaaatagaatgatttttgtgttttgtttatcagattccaaaatgctttcacatatatatcatctgaccagtagtcttcagttagtgtagatagtgtaaatattcttattatccccgtattttatattataaaaaataatagttaaaatccattaggttataggaatttttccatcgattacttagctaataagtgacagactgatctcattagttctcctggtcccctattttttaagacaaagtctcattctgttgcccaggctggagtgcagtggcatgatcttggctcattgcagcctccacctcctggattcaagtgattctcctgtcctagcctcccgagtagctgggaatacaggtgtgcaccaccacgcctggctaattttttgtatttttagtagagatggggtttcgctgtgttggccagactgatcttgaactcctgacttcaggtgatctgcccgcctcagcctcccaaagtgctgggattacaggtgtgagccamcacgcccggccatctcctaacttttgacatggggataagtccttttgaaaagatgctaattgttgtaaagagagattattgattctgaagcatctttctggagttgaggccatcatgtgagttggccagccactctgttttagttgctagcaactgtgtggtataatgacatgatcactggattttttattggcctgggtttagaacataccacaatataatagcaagaatttgtttgtgttctactttataatttttaattagaactagggattctttattctttagaaggataaagtagcatttcagtatgagaggcagaattacatttgcctaagtagataamctctagaatcagatagcccaagtttaaatcctgactctgccattcttgctgagtgacttgggtcacattactttactatagatgataaacagtacctgttttatcatctataaaatgagggtgataacgtacctacttcataggattgctctaaggatcaagtgagttaatatcatgatggtgcgggagccacaattacctttttagttgatcagtttcctttttgtaacagtaatgaattggaagggacaacaggaaccgggagtagttgaaaaggatactagcaagaaagaaagaaccaatgggagtgagaaaaagtgatgatggagtagggggctgatagccaatctcaacacgcagatctctgtctttattggagtcgctggggtgcagagatccagtttgcatctaagggagtctgacacgtatctattaacaagtccaaaggtaaagctgttgtctaagcaagccctgcgcctcctccagtctaatggaacagcaaaatgacataccaggagccctttagtgacttacttaaagctaaaagtttgaactcttgcccctgaagaagagattgcatctcggctttcagtgtggcctgtggcttaagctatggagataattttgagggattttaaaaatataaggtcatctagagtacttgtctttcagttttttctttttagttgcccttcactatttctgtaatgttggcccgctttatgtttagtgagttccaggratactgttataatgctgactgtcttctatttccctgtccctaaagatttagcaagatgagagtctctaattattatgatgcttagctgggatttggttcaaaatagtttaaacagtttattctacctagaatgtcctctctcttctctgcacgtccttagtaacccctgtggcccacttcttacttaggtctctcctaacatgtatctatgacacattgatccctaacagctatgattcttcttatactttttcagtaatttaaattttatcattctactgcttgttcaatacatctctctatgtaaatcttgactccataatgaggtttttaacttcgaaggggttggaagttatctgctgccttggtacccccccgccattacacaagagtacattttaagcacattacacctgagtgattgttgtaaaacacagatgcaatctttccaccatcctctaagaattcttctgtggcttccattggttaccaaaaaaagtctgtgtccagtgcacaagaccatgacccagctcagcctggtccttgcctccttgtctaactccctctccttcgggtatccaggatttgttcgtgctaacagacagacttctctaataggtgaattccttggtgggggtgggtggcatgcctttgcatattgctttctctctgctgagaatgcaagcctgtccctagccgtttctgccactcctcctgatcyggtgagtttgatctgcctttcacaatgaatcccagtcagtaaatatttatcactgacatgctgaccctggcaaaaattgatgagagactcaactaaggcagtgatagtgaaggtacagatttgacatctggttaggacatagggttgacaaactttgtcactctttaggtgtagaggaaatacccaatgaagaggttgaaaatgtgttgagttttacaattgactggagctttctaggggccacaataaaggcaattggtgagtatagttgttttaaaaatatccagtatctgttaagcatttaccatgtgcagggatatggcaggcacttcacattaattgttttatttattccttaacaacagttttgtaaggtaagtagtattattaaccctatttacagatgacagaactggggcttagtgaaagtcttttagaaacaaaatcttggtaccttccatatatacctaaagtgtgaaagtaattgggcctggggtcatagagctgtatagattttttatgataattggaaaatgtataatcttattatatatttatgatgattattaacttgcatttgaaggctgtgaacagggcatatgcttaaattgctgtggcctaacaattcctgttgttacacttgctcaactcacaggttattttcctggcttcatatatgcaagtttgacattrctgttcaaagactttaaatttagaattctcttttaaaaatgtaaatgggattttgccttagaacagcaagccactgacattttgtgcagaatgtagtatacataatgcagagttttacacagaaaacttggcaggcatgtgtggaacggctgcagacagggacagcctataattgtgggtgcaacccgcgtgtgtgtagggaggggggtgaagcagcgagaagggtggagggcagcagctggggaccagaggagaagtagtgtgactcggtgaccaaggagaagaaaagggtgcttccacagttttgaaaataaggagtttgccaaaaattgtaaagtctaaatgcagaccttgtttggaataaagatgaatttcgttttagctctgtatcctttggcaaccctttttttcccctctcattttttttcctgcgtgaaaaagagggaaaggggtccatccagtcatgcatatgaatgtttctataccagagtagtaaatatatgcatcttatgccttcgtgtggtcctttgtaactgtgaattatgattttggaaagctgtgtttttttaatcttgtttctgtaaggataaattaatcaaagttaacctctcaaaaaagtcctggttctgtaggggggaaaaaaaacaacaactgattttcaaaaatctattagtggggaagactatattatacaaatagtcatgagcatttctgggaactggcttccaatatcccagacagcgtgacctgaatgtgaaaaaarttgagaccactagttttgagccaaaatcatacaagcaaagagaaagcaagctgttgcccaagattgtggggtaaccataygtttgagccaggacttgatgaagtaattgtgcgcaggaccccgtaggggtactgggccgtagcccacagagcactgcaggcccctgctcaaagcagaccacatgaaggcccacacagactgagtctggtcctgctggtggccgcagcaagtaagaaacaaagtgggttattaacatccactggaatcttaacctcatttaaaggaaaacttgactttgagttaactgtatccccccmaccccccgctgtcaagaacccacctctctagctcattcctgtgtcagtgttgccgtattaactgcccacctgctgctttgtaaaaggagactagagtttacccttcttattttagaatgttttgaattctcttttttaatgcaataaatttaatttaccttttttttttaacctacaataagattgattccttttggtgtacartcgtgttgtgacttttgacagtgcattcagtcatgtaaccactgcccataacagaaacatagatcggttctgtcacctctcccctgccccagatgttcttgtgttgcttgtgtacagtcagtcctgtcctctacccccagccagaaaccagtaatctggtttctgtttctgtttttctgccttttccagaatgtcataaaaatggaatagtatagtatatagcctttagtctggctttgttcacttaccataattaatttaaaaataaatgtcttaaagcgtagaaaccatgatcattttaatttgtaatggagaaattttttattgcttttagtatattgagaacttgtggatcacactgtatttgaaattattaatgctggatgttaaaaggtcactaaaagtatgtactttttagaaaatttatttcactgtattttattagtattataccttatatactgagtctgggacatagaagtcttaatttctactgcaaaatggatttttttttttttttttgagatggagtttcgctctcgttgtccaggctggagtacaatggcacgatctcggctcaccacaacctccgcctcccgggttcaagcgattctcccacctcagcctcccaagtagctgggattacaggcatgcacctctatgcccagataaggtttgtatttttagtagagacggggtttctctatgttggtcaggttggtctcgaactcctgacctcaggtgatccacccgcctcagcctcccaaagtgctgggattataggtgtgagccactgcgcccggccgaaaatttatatttttaaagcgaaagctaacttctaattttgaaaawttttattgggagcaggatattataataataatctttagttgttaaaccattaaacatcaaggttttttacattgtttctatgcctcctccctcaaaaaaaaaaaacctcctacaataaaactgaaaaattgcacaaagacatattagtggaagaccactgcttcgtttacacaaatgaagagtataaagcagagaagtgctccttggggcaaaaggcaattggcaaaaagctaaggaacattttcataatgagttagaaatacagatcatcaggaatatccaggaagcgatagtgaataccaggcaggcttaagagacaggaaacatttagcatgttggtaaaccactttagcacatcagcaaaagcatataaacagctttaggattggaaattattgccatggggaaaggcaacaatttagaggagcaattccaattaaaaatataaagatcgtttctttagattaattcttgagttgctcccctatgcctgtgtagcagaatctaaaagataatcatgtgaacgggagattatatttwaaaaataaactttgaaattcataaaaaggaaaatgttaaagaatgtaaaattatactggtagaaaaaaaatttttttttttgaagatggagtttcactcttgttgcccaagctggcgtgcaatggcacgatctctgctcactgcaacctccacctcccaggttcaagcaattctcctgcctcagcctcccaagtagctgagattacaggcacgcgccaccacgcctggctaattttttgtatttttagtagaaacggggtttcaccatgttggccaggctggtctcgaactcctgacctcaagtgatctgcccacctcggcctcccaaagtgctgggattacaggcatgagccattgcacccggcagaaattttttaaaatagaaaaaaatagcccattcatgatacaygaattaaagaaaatattggtaacatgtatggtaacagattagtagctgagaacccaaaggctgccccaggttgcttcaaatcctggttctgccatgttccagctgtgtgaccttgggcaaactatcttaccctttgtttcagtttcctcatcaggaaaatgggctttaataggattattgtgtggattgagttaataagtaaagtgcttagaacaggcctccaaaatagtaagtgttgtatgcgttagctattattaatacatcacaaatttccactaaagaaaatcttccctagtttgtatatgggattgtcagaaaacaaatggaaaaatcatagtataaacagcctatatggctttaaagaattatataaaacacatgatctttctgaagtagttttttaaaagaaaaaagttagaactaacttctcccttgattttcactttttagagtggtgaaaccagaacaatatctcactttcattatactacctggccagattttggagtccctgaatcaccagcttcatttctcaatttcttgtttaaagtgagagaatctggctccttgaaccctgaccatgggcctgcggtgatccactgtagtgcaggcattgggcgctctggcaccttctctctggtagacacttgtcttgttttggtaagtgcttcttacgatctcattttaatctcattgatttttttttttaaattgcttccactggcagtgaataaactctgatgctgtatcccagaactgaggtttttcaacttaaacttctacttttggaaaaacctaaaaatctcatttccaccgttgcaactgcctcttattcatgactggtaggaatgtatccatgatgattttagagatccctaagaaggtgtttttcttcctggtagctttatattacagaaataataggtctctcccccacattttttcaaatataaattcatatgtaatattgaattccttcctcctcagacagatactttatctcattttttaaatttaaaaactagggataatgatagacatacttcacagggttcctgtgagaattcaatgaattaatacattaaggagacttagaagagtccctgatgttttctgagcattccataaatgtcagtattactgttactcccctgaggttcctgtctgtgcccccaacggctaattctttctccaccagtcattcccagtcccagcctgtatacagcctagatcttttcttctctttttaggacctttattttttcgttacttgggatacatgaaacttctgtttgcccttatacttctcctaacttctgtctttacttcttcctcttattataggatcaaacccaacaataatactgtctgctttgatttccatgccatctactccttcagtagtccctgcagcttagtttctgctttctgagcgtgttctaagattatcaataacctaagcagtttagcttgtcctggtattcagtctggtggggattttgtttttgtctttgtttagacagagtcttgccctgtcacccaggctggagtacartggtgcaatcactgctcactgcagcctcaacctcctggactcaagtgatcctcccacctcagcctcccaagtagctgcctgcaccaccacacccaactagtttttgcttttttatttttagtagagacaaggcctcactatcttggccaggctagtctcaaattcctgggctcaagtgatcttcttgcctcagcctgccaaaatgctgggattacaggtttgagccaccacgcttgacacaagactggtgttcttaaccttgactttaaggccctgtattagtctcttcgatgtttctgtaaaacgtagctatgcttcattgcagttatgtcagcattcttatgctttccaccatgactgccagcacaaagtagattcccaggtgaattaatatgatgatgcttttcattgtaaacacacacacaaggagcttgatcaatggagtgatactcttggaaggagtgatactcttggaagaacatttcagacgttgcatctctaatgaaagctaggaattgggaacggttgagtcttaactaaacatctgtattactttaccactctgcgtatatatagtatacttcaatcaaaattagattgttacatcaaagttttaaaactctggtgattattttgttaatgacacctgttccctgccaactataacttcaacaattttttttcttttatttttggtgagcctgggtgtggggattctaacactaggtcagtagtccagagcagtgctgtagctcagcagtgttatcgtggatctgggcttttgctgtcttttccaccgtctttcttcattttattttattattctatttatttatttatttatttatttgagacgaagtttcgctctgttgccagggtggagtgcagtggcgcaatctcagctcactgcaacctccgcctcccgggttcaagagattctcctgcctcagcctcccgagtagctgggactacaagtgcgtaccaccatgcccagctaatttttgtatttttagtagagacggggttttaccatgttgtccaggaaggtctcaatctcttgacctcataatctgcccaccttggcctcccaaagtgctgggattacaggtgtgacccaccacattatttatttatttatttatttatttatttatttatttatttatttatttttgagatggagtctcgctctgtcgcccaggctggagtatagtggcactatctgacctcactgcaaccgccgcctcctgggttcaggcgattctccagcctcagcctccaatgtagctgggattacagacatgcgccrccacrcccagctaatttttgtatwtttagtagagatggcatttcgcgatgttggccaggctggtctctagctcctggcctcaagtgatttggcctcccaaagtgttgggattacaggcatgagccatcatgcctggcctcttttccaccattgttagatgggtgctgtatatccagacatcgtgtctgtagtgcagacatgaaggaggcggaaggggaatgagcagaaaggttgactcctgccatgacttttaaaaaaaaaaatagtccttatactagccagaactggttataaatccttcctttaaccaatgactggccagaaggaatgagattactatgattggtttggaatcagttgtgaatcagctaaagaatcaaagtcctccaactacttgaggggttgagatgtggggagggatgagtaggctgggatagttgttgtgtacataacagttayagctggagkgttaaattatcgttgttctttcagaggrgaaaatgcatagcaaaaatcttagcaatgatcttgcattgattctgtttcctgggttccaataacaagacttgtctcattttttgcctttcttscagatggaaaaaggagatgatattaacataaaacaartgttactgaacatgagaaaataccgaatgggtcttattcagaccccagatcaactgagattctcatacatggctataatagaaggagcaaaatgtataaagggagattctagtatacaggtaaacttcatacaggttttaaatcatatctatttgttaaatacacatagcatcaaataactgcactccacttgagcccttgtctttgtttcaaagagtgtatttgaatttttgtggtaaatccagctggctgtcttaaaattgtaaaattttagctagcttcctcatatatactcagcctcaggttaaatcctgtgtgttacttaaaagcccttgtagaaacaagatttcattaaagaaactgaatttttcattttgggggtggttaatcttttaattattaaagtaactggaaacttgagatacttttgccttcattaaacactgatacttggtttatgtgatatttgactttataacaacaagcaacttgaatatttatggcagatataatgaaattccagcaaaatgttatattcttctggttggtggctttattctcattaagctatttttactgcatatttgtagaacctaagttcaaagactgatcagaaacttgtgttatgtactaagttaaaatgtaaaatagaaacaaccacagactccattttttgtctggtttaatcacatagtattggacataagcagatactgtaagttgatgcataatataagaagatcgactgtcttttcattatgtttctcatgtgtgaacatatttactagcactttcatttctctgattactagccaatataagaatgtaaattagatcggaccattggtgtcagaataaaggtttatttaaaaagattttttccaaayctttaaatagcattaaaatattcttaatgcacagaaacattagggcactcagagccaaaatacgcaatgtttgggaaactcagcccattagaacatgtcctgcttcagacgccagactttgggaacactggatttgccagggtcactttggcagtgatcagtgatttaggtgaagtaaaagttatttcagatgtttaagattaggaaaatttccctttctaatcacagtgagctttcaccaacttaaatctggagttcaaaaagaaaagtagttcaatcagatttccccatgccttcacagcctgcatgccgccttccctgcctgcttcctggctgtgatgagacgggtaactgggagggaaatgtattgtcctttggattgtgtctttcctaccactgctttttttttttttaagttttgtgtctttagttttagaatacatactttatctgagggtggatctttttttatcacagagatgagtttttctggacacacttttttgtggagtctttgacagtgcagtttgtggctagsaaggattttttttctgttaatttatctggtgtgatattgtcctcaggctctcaattctaaggcattttctgcccctattccagataggatattggaaacatctttatccttcaggtactcaggatcagaaaagcatgctgcccattccaaggggttaatttctgcagaaatggtcttggcattctgagaatcttttttaattggtgcatttagaccatcggcatatgaagtgattactgataaagttggattaataaatacataccacacatgctactggtttttttttctttttttgagacgcagttttgctcttgttgcccagactggagtgcaatggcacaatctcggttcactgcagcctctgcctcccaggttcaagtggttctccccactcagccttccgagtagttgggattacaggtgcctgccaccactcctggctaattttgcatttttagtagagatggggtttcacagtgttgaccaggctggtctcgaactcctgacctcaagtgatcgcccacctcggcgtcccaaagtgctgagattacaggcgtgagccaccgcacccagcccaaagtgattgtatcttaagtctgtaaatatgtgtaattataatcttaaagcatgtattcatttacagaaaacttccaatgactttgacattcctatagacatataggctatttgcaattgcctttcagcacaaggtcaggcataaatacktaagctggttgctggtattaccacatatttattagcatattcccagtattgatgatgacagttaaccccccagagtaaatatctagtttggcaattcagaactaatgttgtaagatctctagctggtaatttgatattactaataaagtattaaatgtaaatgataaacttttaacaaattacagaggatttgaagtttaattgcattgcttaaagctttcttcagtgagagaaatgggtagagctagggttctaggcattgtgtggggggcatggctcctagtggcagtgactcatgggttggtgcaacgtgagcacagaattagaaagaaagatgaaacagtaccaggcctcaaaatgagagctcctttgaggttatagtttagtgaaatgtaattccttggcttcaccagtcagcattratgacctgaggcaggtgactcaggagtgctggctcccttgtgtgtcacagggaggacagagacgagtgagtttgctgaacctatataggcatgagtgagtttgctgaacataggcacgagtgagtctgctgatcatagccatgaatgagtctgtcgaacatagccatgagtgagtttgctgaacatagccatggcaaaatgacattgttgggtttgtggggtttttttaattcactagcattaaatatctcttttatttctctctctgccgagtgctttccttgttgacgtattctgaatttgttgcatattctgggaagtggtccagtgagacttgatttttggtgtcatcttatttgttgacattgttgagtgttgtccagctataaggccaagttacataactaggtctcagtcaagagtggaaacttcaaaaattgaccagtgtaaattctggagacaatttaacatttttgtggggtactttgttgaacacacatctttataaggggtcacagcatagtcaacccagacttgcctaggttaaaattctgtctctactatttgttaggtgcatatccttgggcgagttacctaattattctccccacatcttccgtaaaaagggtgtaataatggtaatattagtattagtgcttatctcctaaggttattgtgaggattaagagctagcacatttgaagtgttagaatatggcatggagagtagcaagtactccatgtcttcactataaaagatttggattgagtaacaaaacaaacaagggaacaaagaaaatagacagtcatctaagtgaagacatccttaattactcctgtgttccattatattgtagtttcttgattgttggcacagtattctttcggggacatggtttgcgccctcttagggctcaggattttcagttctaccccactactcatgaagtccagagacctctttcccggaggtctatttcctttccagcctcatctctcctactcaagctttgcgtgttttccatcctctagacaaattgtaccaaactgtactactaactgttctccaaacacaacaaactgtagaatttcacattttctaaatcttctgtaaatcaactattataaaacaaaaaagccagccgtggtagttctctcctatagtcccagctactcaggaatctgagacaggaggactgcttgagcccaggagtttgaggctacagtgagctgtgatcacaccattgcattctggcctgggcaacagagtaagaccccatctctaaaaaaattaaaaacataaaaagaggtacattgattatgcagctaagtaaaatagccatatctgggaacggtgaagtgtggaaaatgcttttttttttgaaacagagtttcactgttgttgcccaggctggattgcagtggcgtgatctcggctcactgcaacctccgcctcccagattcatgcaattctcctgcctcagcctcccaagtagctgggattacaggcttgcaccaccatgcctggctaattttgtatttttagtagagacagggtttctccatgacaccgagtctcatctttcacccaggctagagtacagtggcacaatctcagctcactacaacctcggcctcccgggttcaagcaattcttctacctcagcctcccaagtaactgggattacaggcatgtgccaccacacccagctaatttttgtatttttggtagagatggggtttcaccatgttgcccaggctggtctcaaactcctgacctcaagtgatctgcccacctcagcctcccaaagtgctgagattacaggcatgagccactgtgccaggcgtgcctttttctttttaatacctctggtacatgatgacaatgagacaaattagaaactagtttatccattgtatgaatggatttcccagagattttttaaagatctgaatacaagcattgcttttaacagtaccatattgcacaagagtaactccagggaatgaatattccataagttctaaaaaactttaagttgcaatgttacatctctgtccaaaatcattagactcctcgggcaataagtagagtattccttatttattagatccaagactccttgcgtccttgataggatcttcaaagaaggccatccctgtccataccaagtcatttgggccagtgtcagtcataggtaatcaaaaccattggctcccactgcttctgcctctaccacttgccactggcagatacatagatggggatcatgtttcatcctttcaaggacttgagagactatagtcccagtgcataggttatatatgcgtttttcttctctggcatgtacaattgtcactgctttcatctgcaggggcccagatacactcttcttcctctacctytgtccctaggaatggtgacaagtgagagcacaggaaacatattttctagacatgatgctgggcgcttcacatgccatctcattaatcacaactgtctcccagggtagatgatgacatcctctttcatagaagaaactgaaatttgtcttcatcttggtccgaatcctggtttgtgttgccatctactcctgaaggccatgctagaggcatgctggagggtgtttctctagcccagtggtgggctagccagctgcctggagctgctagcgtacctgatagacacaaccaaattaaagtcctttagcatcacaaggaccagcttggagatctcaccgttagttctcccctagactgaacagtggcaaggagcaagaaggttccagatcacattcaagcaccactgtggtgactactccagtgttacatacctctggattagaagtggattaagattcaagcaaaatctaccttggctgaaatctttttaaaaatttttgtgttttttgtgcagtgctactttattttttattttgtttttttgtctgttggttggttggttcttttgagacggagtctcgctctgtcgcccaggagtgcagtggtgtgatctcagctcactgcaacctccgcctcctggggtcaagtgattctcctacctcagcctcccgagtagctgggactataggcgtgtgccaccacacccagctaattattttgtatttttagtagagatggggtttcaccatgttagctaggatggtctcgatctcctgacctcttgatccacctgcctcagcctcccaaagtgttgggattacaggcgtgagccaccgcatgccccggcctttgtttttaattgacacttagtaattgtacatatttatggggttcagtgtgatattttgatacatttatgtaatgaccaaattagactagcacgtctatcacctcatacatttatcttttctttgtggtgaaaacgttcaaaatcctctcttccagctattttgaaatctctatttaattatatattattatgtgctaatatatttcatagtacttgaaatatatataagtatatataagtatttcgaaatagccagaagagaggattttatgtgtatataaaatgtgtatgtatataaatttttttcgagatagggtctcattctcttgttcatgctggtgtacagtggcacsatcatggctcgctcactgtagcctccgcctcctgggctcaagtgatcctcctgccctagtctcttaagtaattgggactgcaggcgcgtgccaccacatatggctaatttttaaatttttgtagagactgggtctcaccatgttgcccaggctgatctcaaactcctgggctcaagcgatctgcccgccctagcctcccaaactgctagaattgcaggcatgagccaccacaccctgtctgaaatattaaatattattaaccatagtcattctgtgcagtaaaacaccagaactcatccccctgttgaactgttgttcagtttctcactatgccccctcttccctactctgcgaagcctccagtaggtactattctactctctgcttctatgagattaacatttttagattccacatatgagtgagaacatacagtatttgtctttgtgtacttggcttaatgtcctccagtttcatccattttgccacaaaagacaggatttcttttttttttaatggccaaatagtattatattatatatatatatatatatatttttttttttttttttttttttttccacattttctttctccctccattcattgatggacatttaggttgattccgtatcttgactactgtgaatagtgctgcaataagcacaggagtgccgatatgcctttgaaatcctaatttcatttcctttggataaatacccagtagtgggattgctggatcatatgatagttctatttttaatcttttaaggaacctttatgctgttttccaagatggctgtactaatttacattccaccagccgtgtacaagagttcccctttctccacattcatgccagcatttattttttgtctttttgataatagtcattctaattggggtgtggtgatatctcagtgtggtattgatttgcattattctgatgattagtgatattgaccattttctcatgtatctgttggctctttgtatgtcttttaagaaatggctattcaggtcttttacctatttttaattggattacttgtgttttctgctattgaattttgtttgagtttcttatatattctggatattaatccctgtcaaatgtatagtttgcagatattttcttccattctgtagattgtctcttcagtctatcgattgcttcctttgctatacagaagctttttagtttgatgtaatcccatttgtctgkttttgcttttgaggtcttatacaaaagacccttcccttgcccagaccaatgtcctgaagtgtttccctatcttttcttctagtatgtatatttgtttggggtctcatatttaagtctttagtccattttgagttgattttttaatatggtgagagataggggtctagtttcattcttgggcatctagatatccagtgttcccaacaccatttatcaaagagactgtccttcaccagtgtatattcttggcatctttgtcaaaaataaattggctgtaaatacgtagatttatttccatgctctgtcttctgttttattggtctttatacctgttcttatgatagtagcatgctattttggttactatagctttgtagtatattttgaggtcaggtagtgtgatgcccccagctttttgctcaaaattgctttggcttttggggtcttttatgatttcatacaaattttaggattatttattctgtttctgtgaagaatatcattggtattttcattgaattgcattgaatctgtagatcactttatgtagtatggacattttaacagtattaattttaatccatgaacataggctatctttccatttgtgtcctcttcaactttttccattaatgttttataattttcattatagagatctttcacctccttggttaaatttattcctaggtaatttttttgaaaatggaattgctttcttgatttcttttttcagatagtttgttagtgatgtataaaattctactgatttttatttgttgattttgtatcctgcaactttactgattttttttattagttataacagttttttggtagagtctatagggttttctatacataagattatgtcttctgcaaacagagacaatttgacttcctcctttccaatttgaataccctttctcttagctaattgctctggctaggacttacagtattatgctgaataaaagtgttgaaagtgggcatcctagcccggtgcggtggctcatgcctgtaatcccagcactttgsggggctgagatgggcagatcatgaggtcaagagattgagaccaccctggccaacatggtgaaactctgcctctactaaaaatacaaaaattagctgggtatgctggcacgcgcctgtagtcccagctactcgggaggctgaggcaggagaatcgcttgaacctgggaggcagaggttgcagatcatgccactgcactccagcctggtgacagagcaagactccatctcaaaaaaaaaaaaaaaaaagaaaggaggcatctttgtcttgttccagatcttaagaggaaaagctttcaactttttcatgttcagtatgatattaactatgggtttgtcataacgtggctttgtgttgaggcacaatttcctccatacttaatttgttgagagtttttatcatgaaggtatgttgaatttttttttttttttgagacagagtcttgctctgttgcccaggctggagtgcagtggtgcaatctcggctcactgctacctccgccttctgggttcaagcgattctcatgcctcagccacctgagtggctgggattacaggcatgcaccaccacacccagctattttttgtatttatagtagagatggggtttcaccatgttggccagaccagtcccaaacgcctgacctcaagtgattcacccacctcagcctcccaaagtgctgggattacaggcatgaaccaccacgcccagccgctatgttgaattttatcaaatggtttttctgcatctgttgaaatgatcatatggttcttgtccttgattctgttgatttttgagagatcatgtttattgatttacatatgttgaaccatcctttcatcccttggatgaatcccacttggtcatggtaaatgatgtttttaatatactgttgaattcaatttgctattatttcattcaggatttttgcatccatattcatcaaggatattrgcctgtagttttcttttttgttgtgtccttgtctggttttggtatcagggtaatgctggccttacagaatgattttggaagatttccctcttcagttttttgaatagtgtgaaaggaattagtattatttaaatgtttgttagaattcagccatgaagccatcaagtccgggcttttctttgatgggagactttttrttactgatttaatctcactctttattggtcagttcaggttttctatgtcttcatggttccgttttgatagttcgtgtgtgtctaagaatttagccatttcctctaggcttttcaatttgttggcatacagttgtttataatagtctcttacaatactttgtttatggtattagttgtaatatctcctttttcatctctgatttgagtcttttttttttcttagtctgctataggtttgttgattttgtttgccttttcaaaaaaatgatccttggttttgttgatctttcgtttctttttttggtcactttatttccattcttctggtctttattattttcttkgttctgctaatttkgggttwagtttattattttctagttccttgaggtacatcaggttgtttatttgagaactttctttttytytttttttttttttttttttgagacagtttcactctgacccctagactggagtgcagtggcatgattttggctcagtgcaacctccgcctcccgggttcaagtgattcttatgcctcagcttcccaaatacttggaattacaggtgcccaccaccactcctggctaatttatggtagagatggcatttcaccatgttggccaggctggtctcaaactcctcacctcaggtgatcctccagcctctacctcccaaagttcttgggtgtgagccacccacctggcctgattgtgatttttttctttttttaatttgttgagacttgtttttgtggcctaacatatggtccatcatggagaatgttccatgtgctgatgagaaaaatgtgtattctgtggctgttggagggaatgttctgtaaatgtgtgttaggtccatttggcctagagtgcagtttaaatccaatgtttttttgttgattttatgtctggatgatctgtccattgctgaaagtgggatgtagcgttctcctgctattattgtattgcagtctatgtctccctttagatgtaataatacttgctttatatatttgtgtgcaccagtgttgtgtgcatagatatttaaaatcattacatcctcctgctgaactgacccctttgacctttgtttctttttacaatttttgacctaaagtctattttatcaaaatatagctactcctcttctctttttggttttaatttgcatggagtatcatttctcatcccttcactttcagtcttagtgtgtccttacaggtgaagtgagtgtcttgtaggcaacatagagttggattttgttttttgttttttcatccattcagccactgtatcttttcattgaagtatttaatctatttacattcaagggtattattgatagataaggacttacacctgccattttgttaattgttttctgtttgcttttcatattctttattcctttctttctctcttattgtttacctttgtggtttggtgattttctatagtgataagctttgatttatttctctttctcatttgtgtgtctgctgtagttactttttttctttgtggttactctggggcttacattaaacatcttagagtgttttaagctgataataacttaaccttggtctcataaaatatttttggcttttaccctccccccacaacttataattttgttgcttaatttacatctttttatattgtgtggtccttaacaacttgtagctgtagttaccattaaccattttttacttttaaccttcataatggagatttgaaagattatattccacagttacagcaatggagttttctgaatttggtaattaatttacctctgtcagtgagattatattttcatatattttcatgatagtaattatacttttgcttccagtcaaagcagctcccttaagcatttcttgtaaggctagtctagtggtaataaattcttgcagcttttgcttgtctgggaaagactccatttttctttcatttctgaaagatagctttgctagtagttgttatctttcagcactttgaatatattatcccattctctacagtctgttctttcttggcgtgtacaggttttctgagaaatctgttaatagcaacctgccaggttcccttacatgtgacttgatccttttctcttgctgcttttagaattctctatgtctgacttttgatggctttattataatgtaccttggagagaggacctctttgcattgaatgtgttcagtgtgctgtcgagtttcatggatctggctaccaatattaaaattatattactgtgactaatagttgagtgtggtcccagtatagtttgtctcaaataggtaaaagtmcacaagattttattaagattattatattcaactatatactcatgtacataaatactaaatgctttattataaaattttgaaattaaaataagcatagttgttacaagctacagtatggcaaaatgcctttttctttttcactcatcttttagcatcattgggttttcttaacttgaatataggattttaattcataaatttttttatttaaggaaaataaatttttaatgtttgcatttgtttttcatttctcttccctacctagaaacgatggaaagaactttctaaggaagacttatctcctgcctttgatcattcaccaaacaaaataatgactgaaaaatacaatgggaacagaataggtctagaagaagaaaaactgacaggtgaccgatgtacaggactttcctctaaaatgcaagatacaatggaggagaacagtgagaggtaagctttctataactacaggctgaaagatgaggcttttttattttaaaaataaattttatgggaccaggtgccataggatttcaggtatgtaatttttatattaggaaaatacaatcacgcctgtaatctcaacactttgggaggccaaggagggaagatcacttgagtctaggagtttgaaaccagcctgggcaacatagtgagaccttatctctacagaaaataaacaaaattagccaggtgtggtgatgcgagcctgtggtcccagccactcgggagactgaagtgggaggatcacttgagctggggaggtcgaggttgcagtgagctgasataccaccactgcactcccacctgggtgacaaagcaagaccctgtctcataaataataataataaataaataattatgtggatatgatatatgaaataatataggcccttttttttattgaattaatataacctttttttttctctgtcacccaggctagagtgcggtggcacaaccttagctgctccacctcctgggttcaagcaattctcctgcctcagccctcccatgtagctgggattacaggcgcccaccaccatgtccagctaatttttgtatttttagtagagagagggtttcaccatgttaacaaggctggtcttgaactcctgacctcaggtcatccacccgcctcagcctcccaaagtgctgggattacaggcgtgagccaccrtgcccagccaaattaatataacctttatttcttacctgagggtatttagtatatgatgacaaaggtgttcttaaggagctttcagccaatacttagaaaccagttcaaaaatcctttaaaacaataatgattgagtgtaaaagttaatataattgggtgctaaaatatatggtatggtacagaaaataagtagtatgaatacctgccatttgtactataattataatgtaactgataatatgyctttaataaaacatttaaacatgtaagcttaattgcattactggagaaagaaaaaggcgttttttaaaaatccatatgaatgtggcatctattcagaattttaaattacaattacatttctaagactgtctctcacagattaggaagctgataacctggtataagtcacatagcaragtgaatgaggtttttctttcctctctcctgcatctctgaataacttttcttcttctctttttgccaaatatacttcttatcatggggaattttatcttgtggttatatttgttagattggaatgaaaatagtcgaagtctgccatacattatagctttactgctgtattttcctaatataaaaattaaayacctgaaattttataaatgctaacatattccaatatataatacatgtattattatatattatagtggaagagtttattatgatttagtaatgttattcccaatttttgacttcagtagttttagactgcaagagaaagcataatttttttggttccttttttcatcttaaatagaatatctttaaatcaggaaataatagttttaagttaccttagctttttcaataataaggctttcagattcctagtgttactgctttttccccccttttatctagtactatctgcagaattaaatgaaaaacaggcttgatgactgaaatggcattcttagtatttcagaagtgttgagttttaatctacaaagattcagaacaaccatgttaatcctagtgagttaaatcactcatacaagcttgcaaatacagaggagactactaaaaccactctagagtctataactctaaggagttatagagtgattgcagaagactgttttatggggtctstgtgtgtgtttatgtgcctgtacatgttttcgcatgtggtggcggtgttttcttctttcccttttttccttccctgtctgataaatgagactggtgcatgtttgaaagcagagagtcccaacagaaaagtcagaattctaagcggagaagtctgattacaaaaacaaggttacagaaatgaaaaagaggaggccgggcgtggtggctcacgcttgtaatctcagtgctgtgggaggtcaaggcaggtggatcacttgaggtcaggagtttgagaccagcctggccaacatggtgaaaccccgtctctgctgaaaatacaaaaattaaccaggcactgagagtgagaaacaacttggacatacgaattttaaaatacaaaaattaaagaggcattaacgcctgttgtcccagcttcttgggaggctgaggtgggagaattgcttgaacccaggaggttgcagtgagccgagatcataacactgcactccagactgggcaacagagcaagactcttatctcaaaaaaaaaaaaaatgtaaaagaagagcataggatcagggtgtgaagtaaaggttactctgaacagttttattttttaatcagtcccagtaatttttaatacctatagatagctttgcattaaagatcctcataaaagtcttatcaaaagaatttcaagtttcttttttttctttttttttttcctgagacggagtcttgctctgtcacccaggctgaagtgcagtggcgcagtcttggctcactgcaacctccacctcccgggttcaagcaattctcctgccttagcctcccaagtagctgggattacaggcccccgccactacacccagctaatttttgtatttttagtagaggcagggtttcaccatgttggccaggctggtctcgaactcctgaccttgtgatcctcccgcctcagcctcccaaagtgctgggattacagacatgagccaccacacctggccagaatttcaactttcaaaagaaatagaacacagtactttcttgtattcattttcattgtattcatttggaggatattcatcctccaaagcagtgtttttcaaattgaaggtcaaatcacatagtcgtgaagtttattggattataaacattttttaaagaagaaaatagaataaaatagaaattatcagcatatcacaaataataacatgaatttaacagatgctggcgaggttgtggagaaaaaggaatgcttaaacactgttggtgggagtataaattagttcaactattgtggaagacagtgtggtgattcctcaaagacctaaaaacagaaataccattcaacccagcaatcccattactgggtatacacccaaaagaatataaatcattgtactgtaaagatgtaaacacacgcgtatgttgattgcagcactattcaccatagaaaagacatggaatcaatctaaatgcctatcartgatagactgcataaagaaaatgtacatatacagcatggaatactatgcatccataataaagaatgagatcatgtcctttgtaggggcttggatggagctggaggccattatccttagcaaaactaatggaggaacagaaaaccaaataccccatgttcttactaacaattgagagctaaatgatgagaacacatggacacatagaggggaacaacactgggggcctgtcggaggatggagggtgggaggagggggacaatcaggaaaaataactaatgggtactaggcttaatacctgggtgatgaaataatctgtacaacaaaacttgttgtacatgtcacggagatgacacaagtttcaagcttatgtaacaagcctgcacatggacgtacccctgaacttgaattttaacctgtttttatatatgtatgtgtgatgtataaattccatatatttacatatacattgtgtacctatgtaagtgtgtgtgtgaggttactctgttgtgatgctatttcttactgtaggttgcagtctgaatttgaaaggcagtattctcaattacagttcaacccagaaacccagatcactgagagtgagaaacaacttggacatacgaaaagtctggagcaggcagagtggctcatgcctgtaatccyaacactcggggaggctgaggcgggtggatcacttgagcctagcagttcaagaccagcctgcgcaacatggcaaaccctgtctctacaaaaaatacaaaaatccgccaaatgtggtgggacctgcctgtagtcttaagggaggctgaggtgggaggattgcttgagcccaagaggttgaggctacagggagctatgatcacgccacatgatcttccctgggcaagggtccacaggaggcattcccattggttaatatcctaaattgcataaatatacgggaaaacctgggcaggtcccayttggcaagtcattacacagacataatttctttaggccccactaaggaagaaaagattttatcacaaatcgagagtagtcttgtcattctctggaattgtgttcttaaattagatacaggcatgccttggtatttgtctctagtccattcctgaattatatagtgcacttttggaaagcaaaaacctctgttccattcttttaaatgagaaaaatagtgtgttgtcagcccaaccagaaagcataaccagttcccccaaatatagtacaaaaccttttaaactcctatgtagcatttaaagcactaattatgtaatcatataacacttaagggactcattattgggcttgtatggtaaatgacaaaatactagatacaaattataattgccttctataccgcaatgaaaatraaaaatgaaataatacgttaaagattatatctaaattggaaccttgttaacgatacccccaggctcctggcaaaagctaataaagggcccatgggaggctaaccycctctctgtttttatacatattttgcctacacttgaacacaaatgttttcactaacaggtacatgcatatttgtgatagtgaattttcaattcagagagtgaattctgagtaagaatttttgcaagtcattatagcagatattcagatggagttcagacagccagggatacctgtatatatgataacaaaaagtgaaaaagacatgagaaagcaccataagatgaacaaagatagcaaaacccagtctgtcctcaagttgcagaatatgtgatgaagataaaacaagtacccaagttagcacattattagtaaattataaattacttcaaattaaatgccgtaagaatagaagggctagagggggtggagcaagataattgaagagtagaactgaaatgagaggacaggagagaagggaaggtttctattttagtggggaacaaatttggagaacagcaaaaaaacggcaagaacaaagttctgcatagcaggagaatattggcaagcgtttgcatggacatgtgttctcagttctcttgggtacatatctaggagtggaattgctaggtcatatggtaactctatgtttaactttttgaggagctgtcaaactgttttctgtggcagctgaaccattttacattcccactaacaatctcttggggagagaaggttccagtacaccaaagaagtgtaacattgattaaaatattctaatacatagttcaattcagatttctcttgtctgaaagattcaccatatagcttttttaataaagttttatggaaatataatttatatagcataaagtttactcatttaaagtatacaattcagtgacttttaatatatttaccaaattgtgtagctggcaccacgatctaattttagaacattttcctgatcccaacttctgtagctgtttaaaaaatatttcaagattaatcaaagattgatactatatttagttgatgtgattctttggtctcctttaatctggaactgttccctgcctttttcttccttgcttgacatttgtatttttgaagcttctaggccagatatcttttagaatgccccatacaatgcatttctttaatcattatttatcatagttaaattcaggttaaacgtcttggccaggaaaaaggtagtctcaatgtaggagacattgaagaggcatttgagatttttaagcaccatcgtgcactaggcccggtaacgaaaaaaaaaaaaaaagattttaaatcaagctacgtgtccaggggtatgctctagaaaaattaccatggcaataatayttaatttgagggcagggaagctggtwaggcctttgctgtaatacagaaaagtgaaaagagggaatggaagaaatagtaacctatatgttgccattggccgtttttttgtttttgtgggtgtgcttttatagagaggcaagacttgctatattgcacaagctggacttgaattcctgggcttaagccgtcctcctgagtagctggatggcattattatttatatagaaccagaactaagtatcttgagagtcagagaccttccactgaaacaaaatttctgagaccggacacagtggctcatgcctgtaatcccagcactttgggaggctgaggtgggcggatcacttgagatcaggagttcaagaccagcctggctaacatggtgaaacatcatctcactaaaaatacaaaaaaattagccaggcgtggtggtgcacgtctgtaatcccagctacttgggaggctgaggcagaagaattgcttgaacccggaaggcgggggttgcagtgagccaagatcgtgccactgcactcccgcctgggcaacagaacaagactccatccaccccgcctcccccaccaccccaaaaaaatttctgtattgactatgaaaatgggaggtagaaatgtgtatggtcaaataaaagaataagtgctcccacaacagaatattcatggaaatattaaatagctagcttttataagagccttaaccatcaaacgtgaccaggaaatgggatcagatgcaagtggtacccccttgtcttcccactcctgctcctgctgactagttaacaaggaaggaaagaaaactaacagtcatcaattcacgtgtcaagaaagtaccttgcttattttcaggtcccactaaaagcagttatcaatataaaactgtaccaggaatggttgtcaaggtacatctctgaatcattaaagaatattgaggcttttcttggccgggcgccgtggctcacacctgtaatctcaggactttgggaggccaaggcgggtgaattgcttgaggtcaggagttcaagaccagcctggccaacatggcaaaaccctgtctctactaaaaatacaaaaaattagctgggcatagtggtgcacgcctgcagtctcagttacttgggaggctgaggcacgagaatcacttgagcgtgggaggcagaggttgcagtgaaccaagattgtaccactgcactccaggctgggtgacagagcaagacgctgtctcaaaagaatattgaggcttttcccctcattattccagtgttcaaatagggtgaaaactatgtggatggttttatttgcgcctaggtcctctstgttagagtactcaagtcctgctctgtgtgcacttcctttcacttgtttttatttcctcatagtgctctacggaaacgtattcgagaggacagaaaggccaccacagctcagaaggtgcagcagatgaaacagaggctaaatgagaatgaacgaaaaagaaaaaggtggttatattggcaacctattctcactaagatggggtttatgtcagtcattttggttggcgcttttgttggctggacactgttttttcagcaaaatgccctataaacaattaattttgcccagcaagcttctgcactagtaactgacagtgctacattaatcataggggtttgtctgcagcaaacgcctcatatcccaaaaacggtgcagtagaatagacatcaaccagataagtgatatttacagtcacaagcccaacatctcaggactcttgactgcaggttcctctgaaccccaaactgtaaatggctgtctaaaataaagacattcatgtttgttaaaaactggtaaattttgcaactgtattcatacatgtcaaacacagtatttcacctgaccaacattgagatatcctttatcacaggatttgtttttggaggctatctggattttaacctgcacttgatataagcaataaatattgtggttttatctacgttattggaaagaaaatgacatttaaataatgtgtgtaatgtataatgtactattgacatgggcatcaacacttttattcttaagcatttcagggtaaatatattttataagtatctatttaatcttttgtagttaactgtactttttaagagctcaatttgaaaaatctgttactaaaaaaataaattgtatgtcgattgaattgtactggatacattttccatttttctaaagagaagtttgatatgagcagttagaagttggaataagcaatttctactatatattgcatttcttttatgttttacagttttccccattttaaaaagaaaagcaaacaaagaaacaaaagtttttcctaaaaatatctttgaaggaaaattctccttactgggatagtcaggtaaacagttggtcaagactttgtaaagaaattggtttctgtaaatcccattattgatatgtttatttttcatgaaaatttcaatgtagttggggtagattatgatttaggaagcaaaagtaagaagcagcattttatgattcataatttcagtttactagactgaagttttgaagtaaacacttttcagtttctttctacttcaataaatagtatgattatatgcaaaccttacattgtcattttaacttaatgaatattttttaaagcaaactgtttaatgaatttaactgctcatttgaatgctagctttcctcagatttcaacattccattcagtgtttaatttgtcttacttaaacttgaaattgttgttacaaatttaattgctaggaggcatggatagcatacattattatggatagcataccttatttcagtggttttcaaactatgctcattggatgtccaggtgggtcaagaggttactttcaaccacagcatctctgccttgtctctttatatgcyacataagatttctgcataaggcttaagtattttaaagggggcagttatcatttaaaaacagtttggtcgggcgcggtggctcatgcctgtaatcccagcactttgggaggctgaagtgggcagatcacctgaggtcaggagttcaagaccagcctggccaacgtggtgaaacaccatctctactaaaaatgcaaaaattagctgggcatggtggagggcacctgtaatctcagctactcaggaggctgaggtaggagaattgcttgaacccaggagatggaggttgcagtgagctgagatcacgtcactgcactccagccagggcgacagagcgagactccatctcaaaagaaacaaacaaaaaaaacagtttgggccgggtgtggtggctcacgcttgtaatcccagcacttcggaaggccaaggcgggcggatcacgaggtcaagagatggagactgtcctggccaacatggtgaaatcccttctttactaaaaatacaaaaattatctgggcgtggtggtgcatgcctgtagtcccagctccttgggaggctaaggcaggagaatcacttgaacccgggaggcagaggttgcagtgagccgagattgcaccactgcactccagcctggcaacagagcaagacttcgtctcaaaaaaaaaaaaaaaaaaagtttgaaaaccattggtatagatagatattttgaattgatttgcatagtctccttgaatgtgttaaattatgttgaaagtatgaaagcaggatgtaggtggtactacatattaaataagatttatataacatgtgcctgtgtcctgattcagtattactgtgtcctgtaaccttgaaatggagaggaggtaagagggacatttttttatgtctgtctgcattaaacctgtgttgaggcatccaagacccttacatttcaggttgttattggtttaaaacctctttccagtttgcattggtttgtctttgctaaatgcagtatgtttatgttactctgcaagtcacatacaggtagaccttatgacatttccagttgaaactaggcttgctttcggtacacaggtgaagacttgaggaagccagtgccagagaggacgtgcctcacccctcagctggctgaatgcgcttcattggcttacgctttgctttctgtatgctttctgtccttctgggtggtgtcgcatatatttttaaaaccacattcagtgtgatgaacacttgttggtacacttctaaggttagtcatctttccttctctgagcagatccttgagaagggcattgacagtggatgctttaaatagtgttcagtttttaccagtaataatattttttggtggatgtcatgaaaacacatgacatcgtgttgtgcccatgataaaaagtcctgactttttattgaatgaggtgtgctggtcaaagagacagacgtggctgccttctctggtaacagccagaggaaaaagttagcaattctagatgggttctacagctttaaaaaacttgttgtatccttaggtcctcataatattaaatattttctaattttaacagattttaagagtcagatatatactttgacwtgaatgatgtagtgttgcttaaggaagaaaaaattataaaaaaaatgtttcttttattttcaggagtttttaattcatatctagttcatttccactcatatctatttctgctaatagattgacagcaacctttggtttaatgctgtgttctctagctacaccaacaagttatatattcctttccaatattaaccaagtatttattttatgttagcctatgactgagttttatctatgcttgcacatatatagaatgtaaaaatataattctccatgtttaatgtatccatataaaaatgaaaatacccattttctgcattcttaaagggttaagaaaagtaacatgtaataagcacatggaggactttagaccatttcttgtgttagaggagactttatacatttgtgaggttttctgtcttttggtccttttatgttcttagtccatttcattattgttttaatatttctaccaaggaatgaccaagaaaagagaaaggaagaaaaaaaatgtgttaatcattttcttttaatggtatgtcagcagaaggggttctgactgtaagctaatgtgcacttgtgcctgtcctctttgtcttaaactaaagttggtggtatgaatcgaaaaatgtgtattggtttaaaaagcagtttatgatatgaaacagtcttccagtttttatatcaactcctttgctttcaacagtcagttcaaagcaccatttattgatggtttactgtatgccagacactgtattttttctttacgtattaccctacttaatcctcaacacaattttatgaagtagttattgttagcctgaaactggcatttctccatccttttatggtgctgtctttgaaaagtctcagatgtgtaacatgtcctagaagtagataattatcaaaggaagactgcaactgcaactcacttccctctgagaaaaaatatccctgactagattacatatctagttccagaccagaacctggtggtattaaaagtgttttggttgactattgtataccataatgagtacctacattcccaaattgcctgcctggttgttgtacagacttaaaaatctagcctgccttgatttttacttttcagatacacatgtttaaagagatctttgctggtcacagtagctcacacctgtattcccagaactttgggaggccaaggtgggaggattgcttgagcccaggagtttgttcaagatcagcctgggtctctacttaaaaaaaaaagaaaaatttagctgggtatgttggcacgtgcctgtagtcccagctactcaagaggctgaggcaggaggatcacataagcacagaagtttgaggctgcagtgaactatgatggagccattgcactccagcctgggcagtagaggagacttgtctctctctgtatatttgtctctctctccctctctctctctgtctctcataatacatatatacatacatatatatmyacacacacacacacacacatacagagagatatataaaatagatataaaaataaagatattttaaagattatttataaatatatgttttttaaaaatgtagtctattataagccaaatgtcattaggcatgtagtccatttctttctgtgttcaggcaggagttccagttctataaacattggtttatctgtttttctagcaggtgcacacatgggttctcagtgatgtgtagccggggcatagattgctctcagtctgttgcaccctgcaggggagatgtctgaggtcctccctcgcctggctgtgctggacgcacagtgcatagcagaactaactgcacagcagaaatgcctgttctgcgttcccattgatacaccaacagctaatgaagtctcttttacttttaagaaacccttatttggctttggcatatttacatggtagaggcctagaattttataaataaaattttgaagaatagaaatgtattttttcacgatttaaaaaccacctgtatggtttactctggagttgacctgttccactcatccttctccccagttcatttgtttcgtttcaattccactttcccttatagctatcttcaaagcagtgtctatgggacagcattgscaagagccctgactgggcctggcttggtaactcactcctgtaatcccacctgcccctagaagtgcagatatactagaaaatacagctgtctttgttccagtgaatatgtataaggggtgacatgccttggtggaaagcagctcagattgtgtggactcctcaatccctgctctaccaagagctctccagttccaaaactgtacactcagtggctatgttctgtgtgcctgctcccaatacagccattatgttgttcatccagatttgagaatttaagcttttcactcctctttgggtagtattatttaagtaagaacttctaggaaaatagtatgagtttggttatttttccctcggcagcaggaattttctgaatatttagcacattcagattgctccaagaacagcattgagcaatgctgtacatgtgctttctcctaaggctgtctcccctgtctmctgggttctggaaagactcattgtccttcagggaagggagcatttttcctcactgccattgctgagccttttctcctgttgtatactatttagcccagcatgaagccatcgccgactgtaaggagtgatggatagaagtgtttacttggtttgtgaggccttgtctctaaagggtaacagtctgacaaggaaaacatttcaaagagccctgaccaggcctggcttggtaactcactcctgtaatcccagtactttgggaggccgaggctggagaatcatttgagcccaggggttcgagaccagcctgggcaacacggtgaaaccccactctatttaaaaaaaaaaaaaaaaaaaaaaagccctgayccccctctctgggcgatccattgggagaatttgaaaagttcaaacttttgaactcttcctactttatttttttaaatttagaatggaaggtgggaattatgcaatttggtgaagatgttacagaaactgcttcacgactttctggttttacgttatacagtatgttttgaggagctccaagaattgcacaggaatttttttctttatacagaccattttttaaagacgcatcaagttattctttattgtggctctaatttggcatatttttcagacacaggttgctcttgatacatcaaatttctgctgttaaaaacttcagttattttgagtttagttaattcaggagygggaacctaggtaagtcatctgtagagcatctttgcaccttaagagaagtttctgattagcctcaattcagtttagtagaatattagtgtggatatctggtggcaaaacctattcttggtgcaatttggcttttcgtggcctcaggcatagagctgacttggtagtggaccctctgtccacacccacccggcccttgcgcctttctagcataaagtggtgtgtcagagccactgtctccacagaaagcaccacgtttgtttcatttgacttatttgaacccgtttctcctgcctttgcctttttaaataaaaatagcaaaaattgattcaagtgaatctattagaattttctaaaatggagcccatttgtcttttcagtcttgcaagtaaagtctttaaaacaattaagcctcccaatgatttaaccgtattttcttacccccccaccctgaataatatttacaaagaaataataacgtgaatttttaaaaaccccgtccttcagttgttataaatgatagttcattcttggtaagtatatctgtaacaaaatactggggaaggacatgaggtatggtgaacacttaaaattctgccagccagcttaaatacataatctaaatttaacccacgtaacacctcttctaggtaaacagcattctccctatattcagatgagaaaactgagtcaaagaataagtaacttgcccaagattgcacagctagtacatgacagaactgagattcactctgcagtctgtagacttccagtaactccaaacctcatactttttcttttatgttacacggactctgtttttaatggmatatttaaatgagatatttaagtgggaaagtaatagacaaccactcttacctgttaaaatccaaagtaattctctagtttttaaatggagcacatttaaaaaactttgtgcaccagtttgaactaccactgcaacagagaaatactagaacatcagagtattctctaaaccagatcattacttcattcactttgattgaattgagttgcttattttaaaaagacttctggatgcatggaaaacatatatattttgcagcactcagaatcaatacaaagtaccttcagccactttggttcacattctgaagattcatgtaataaacacccatagtagttgtgggctcacattatctaatgagaatgttttcttgatgacttgacatttctccgtcactgttggataatcagagaaaaaaaggacgttcagaacaccaaggtgcttggtacaattatgccaagtgccctgtctttaaagggagtagcctaattctcagcatttgggagtttttgactaaatgtgtggatatgatttgtatttcctatttcttaatatatatgtgaagatacaatactgacaagtacttagatttggaggttttgcggtactgaggggagttgggggaagaatggaaataccattgacctcctaaaaagttgttacttgcaaagtttgggaggtgacatcaaaaactcaactgcccttacaatagtcattccatccatctgttgcttatttgaattctcatttatttttactttatggcattaaaatacaataaatctgtcaattatgtattttatattagtagtagcttaagattgggtcacttcatttcggtagatataattgttagtattatccttcaggacaaaaagcatctgctaacaacctgtggtttaaaaatataggccaactttatgttcaaacattatgttgataatatttttagcagtattacacagtggaggtccaaattggattagacttttgcattgaattccaaagtattggtaagtctagcacatastataaagtcttgctaaattcttgtgggtacattatttttaaaacctgtctgtctgtcggtatcacacagaggtcacttcttgagtaaaataagatgaccttaagaattcacataattcttgaagaagaatataagtcacgatgcttccacatgaggccgcgtcacaccaccatcgtttggaaatccagcaccccagccgttttaccctaagataacagtgcagcacttagtgtggttgaatgtgtcatgtgggaatgatttttggtcaccttttcagttcattgttagtccttttatgtttgtgtgcatctatgttcgtctgtgtgtttggtaaatatgaattgaatagatgacttcttattttatgttttaggccaagattgacagacacctaatattcatgacttgagaatattctgcagctataaattttgaaccattgatgtgcaaagcaagacctgaagcccactccggaaactaaagtgaggctcgctaaccctctagattgcctcacagttgtttgtttacaaagtaaactttacatccaggggatgaagagcacccaccagcagaagactttgcagaacctttaattggatgtgttaagtgtttttaatgagtgtatgaaatgtagaaagatgtacaagaaataaattaggrgagattactttgtattgtactgccattcctactgtatttttatactttttggcagcattaaatatttttgttaaatagtcttttgttggtttgtgtgcattatcttaggacagctctgcttcaaataatgaatattttcctgtgagtttataatttctgtaacaagcaattgacatactgccgaggcgggtggatcacttgagatgaggagttcgagaccagcctggccaacatggtgaaactccatctctactaaaaatacaaaaaaattagccaggcctggtagtaggcacctgtaatcccagctacttgggaggctgaggcaggagaatcacttgaacccgggaggcagaggttgcagtgagccaaaatcgcaccactacattccagcctgggcaatgagtgaaaactccgtctcaaaaaaaaaggtttttatagttgcccttcaatagtctttctatccttaatagtacaggttaggtgaaagcaataatagaagagttatgatattcctttattacttgggagaatattaatatgggtaatggtattgccttaaggtcgacattaatttcaagcaagcacagcagttcagggcagttttaaaaatcacagcgtcattcctgtgttggatgttgtggtttccccaaacaattcccattacaagaaagccagggccaggcgcggtggctcacgcctgtaatcccagcactttgggaggccgaggcgggtggatcacaaggtcaggagatcgagaccatcctggccaacatggggaaaccgtgtctctaccaaaataaaaaaaattagccaggcatagtggtgggagcctgtagtcccagctactcgggaggttgaggcaggggaatcgcttgaacccgggaggtggagattgcagtgagccgagattgtgccactgcattccagtctggcaatggagccagactccgtctcaaaaaatatatataacaatttgttttgccaactttgaaatttatataatattcataaaaacgtctatttcatatctttaaatttaaatgacttaggttcctttttgccttatatgccaggttttctaggtctgttttaggagtatgtaaactattcctgctaaatctttcctgaaggatgcatgaaaagtttattatactacaaagtagtacgggaagatgatctttccatggtgtccgcaaagctgctggaaagaatcatctatactcggctacctctgtctgctctcttcctgcataccctacccccactcccaaaatgacccagaaacgtcatcttagcttgtactgtagcttaataaagctactgctctttagttttcccttctatggcttcttggcagcatcattaagaactctgtctttgaaactttctccttagactccgaaagacttgtctctgggttttcttcatctcagttcttctgtctgactggaatattggggtttccaaggactccatctttgggcctttgattttaacacacttaaccttggatgatctgatttttccacaagtctttaatacctgtaagctgattacatacaacttcttcaactccaggccagatgtcacttcagagctataaaccatatatccagttccctaagtggtcattgcatgaattccttaccctctaaaatataacgtgatttccctcttttcatctcttcctcctgtattccatttattttgtggcaccccctggaaacttgaaattcatctttagttcctccacttagacttcacgtccagtttggttacaaagtcctgtcagttctgcacagtgactctcgctcccactgccccgccttggtttaaagttccatgcttgtccaacccatggcccacgggctgcacgccgcccatgattgctttaatgcgacccaacactaatttgtaaacttccttaaaagatgagctttttctgcaattttttgttttttgttttgttttgttttagctcaccagctattgttagtgcattttatatgtggcccaagacaattcttccagcgtggcccagggaagtcaaaacattggacacccctgatttaaaccttccttgcttgtgcagctcacagcagcaggttcctgcctagacatgcctgtttgtgcctacccactcagcacagctcccaactaatttaagatctgactgttaccctccttaaaattcgcttatggcgccttagacaatttcgtcttcattttaagtcaaaaagtctcagcacccgcctgccatgataaggcaccctaagctgcagccatcccaaacgatttggaatgagtggaatattgctcatttgctcgatgaatatttattgaacacacctatgtgcttggcactatagtagacagcggatgttcagtgatgggggaagacgactgcagtccacttcctgtggtcttatgggagagttaaaacaacaagcctgtaaataagcaaatatgtaattaaaccagtcataagtgctgtggcagaaatgaattgatagctacttagatgtgatacctacttagatgtggagaaatgagcttacgaaatctgaagcagaggtactaggagtagttggcactgaattttttgggggatggccacgtaagtccccagtttggaaagggcagtggcaaggaagactcgagctttccagataagatgtgactctaccctgtggtctgcaggacaggcaggcatgtatgccaagacagctctggaaaccacgagaagcatctctgaagtaagccgtgtctgccactgccctatgcggtcatttatttttgatgaaaaaccagtatcttaaccaatagaatcagaaacttaaccctttgtgtgtttgggtagattcttcccaacagtccctggcccacgtgaaatgctgcagctgtcaaaatgggattggtgtgaaaacccaccaccatgtttggactggaaggagtgtcgggaaactgaaggagtgatccctgagctgacccttgccagacagataccagacagcatgtggcatgtgacatctgggtggctgggccctttaaaagcaatcctgaacagcagaattcacccactgttcccacatttctaattggcccagtggacaatgtaaggaggctgaggcgaaggcaaggtagcccagcacacaattccctggtgtttcacttagggttctccagagagacagccaacacgatagagaggaaggtgagcaggggatggggaattggccacctctatcatggaggctgagaagttctgtaacccacctccggcaagctgagaacagggaagctggcagcgtgtttcagtccaagtctgaaactaatagtacaactctggaggtccactggtgagagtcccagagtccaaaagccagagaaccaagtgtcgtccaagggcagaaaagcacgtcagccccagcagggagtgagaatgcacccttctctgcctttctccgcctttcactccatccaggctcctgctgattggatgggtgcctgcccatgttgagggtgggtcttccctactcagtccaccgactcacatgccagtctccagaaagaccttcatgggcacacctgaggcagcccaatctaaccaaatgccagaccacatgggtttccctttaggcaaaagaggacaggtgcagagcctcctgaagccttgagagtaatgagtgcttcaccagatatgggggtaccccttcctcccgtcaagttgacactccaaatcaaccatcacacccagcttctcctaatcaaggcagtagagacacttaacattccccaaacaagttcatcagtggcacaggggagtccccaaggacagacaccctctcctgttggcatacagtggcattccaagcagaagttgaataactgctgttaggtgtggaagggagagagtggagacaagaaatgctataacctcccatgtcgggggcagaaaagtagactgcaagagggaaaagcagaatccgttttaatagttgttatattagcatgtgtgaaacaaccttgctgcccttacagataaggttggaaagagctgtgtctggggctctgtaaactgtgagtgctaaatgagcaagaaaaatacaaatgaagacattggtattaagatagataataaaaactaatattctgcttgaaaaatgatggcttctaagtagaaaactaagaattcttaattcaggccagacacagtggctcatgcctgtaatcccagtactttgggaggccgaggtgggcagattacctgaggtcaggagttcaagaccagcctggccaacatggtgaaaccccatccctactaaaaaatacaaaaattagctgggcatagtggtgcatgcctgtaatcccagatactcaggaggctgaggcaggagaatcacttgaacctgggagccagaggttgcagtgagctgagattgcgccattgcactccagcctgggcaaaaagagtgagactccatctaaaaaaaataaaataaaattcttaattcaaatgcccccaggatgacgattttaatgctaacaaatctgcttcagtctagctttgtgtggagcaagtggcagagacatttactcctttccaaatacaggcggtcctccatgttggtgggttccccatttgacatttgtgggttcaacccaccacagatcaaaacaaaacaaataccacaataaaaagtaatacaaataaaaaacacagtataggccaggcatggtggctcacgcctataatcccagcactttgggaggccgaggtgggcagatcacttgccgtcaggagttcgagaccagcctggcctgaccaacatggtgaaaccctgtctctactaaaaatacaaaagttaaccaggtgtggtgtgtggggagggtggggagcgcctgtaatcccagctactctggaggctgaggcaggagaatcacttgaacctgggaggcagaggttgcagtgagccgagatctcgccactgcactccagcttgggcaaaagagtgagactcgagactctgtctccaaaaaaaaaaaaaaaaaaaaaaaatagaggttggctgggtggggtggyttacgcctgtaatcccaggactttgggaggctgaggcgggcggatcacttgaggtaaggagttcaacaccagtctggccaacatggtgaaaccccatatctactaaaaatataaaaattagttgggaaaattagctgggtgtggctgctgatgcctgtaattccagctactcagaaggctgaggcaggagaatcgcttaaagcttggagacagaggttgcagtgagccgagatccggccactgcactccagcctgggcgatggggtgagactccttctcaaaaaagcaaaaacaaaacaaacccacagaggtggactttcttctatagggagatagaaaaatctgaagacatgtaagtgtggagctacacggtggaagaccattaccaatattggaaaaaatgctgatgaacaccattgagcgaagtccctatcgcagaggaaaaataatcagaattagcaagaaggtgtgaagttagtgaaattaggaaaatgagagtctcaggaagagcccgaaccaaggcattggcgaagtggggctacagcgcccacgtggcatctagagtttgggagacaggagcaggggcgaggagactcttcctgcggaggaggcgcggggaacacagccccgagctcctacctgcttaggccgggactgaaggagacgattagacaagacagcaggaactcacgsagcacagcatggaaggaaggggaccccacacgccccgctcccaagtgaggagcaatgcaggcaggtgtggacgtttggctcctcagaatagggagtccccagacagcgatgccggctcagcctgctcatcctggaaactggcggcccttgcgagggcggcgacagtggaatgcgttgaggactgccctgctaatgagattagttcgtctgaaacgtggaaatggtgcagatcacatcatatatcgtttaggaaccgttctgattactactaacaggttggagaaaagaatggcctacacaagatagaa
